United States Patent Application Publication US 2025/0295137 A1 - sequence listing, part 15

SEQ ID NO: 15 - DNA, 1888896 bp, Latilactobacillus curvatus
  source 1..1888896: mol_type = genomic DNA
ccaaatatttttttgggtgataggacatccagtccttttgggccaaaggccttataacgttgaacccacgagacaactagtgagttactcttaataccatattttctcgctattaatttataacctaagggtgacgttagataatcctgaacaacttttatttttaatgttttagaatatttggtcaatataaaaacccccgatattggattttggtccaatatcgggggttcacttcagagacagattttgtcttagcctctttttttgtgttacttttcaggaagaactcgcctaccagctctccgtcttaagtctgatttataagcgaattacttgaaagtttgacctattttgactattatagaattagtcagaataatctgacacttaatttaaaaaataactgaaaaaggaatgacgtctatgaatccagaacaaatgacacaagctgtccaagatgcacttgcagaagcgcagaaaatcgcgatgacgcgtcatcaaactgaaattgatattccacacctctttaaatatttagtccaaccacaacaactaggacggcaaatttaccaagaagccggtgcagatatcgatgctcttgaggcggagattgatcgtgaaattgacgcaattccaacggttgaaggtcaaacgaattacggtcaaaacatctcacaaaacttgtaccaagtattaactgctgctgaaaaatacaaaacagaattccaagatgaatttttatcaactgagacggtcatcttgggcttaatgggtttgaaataccaggcactcgttcaatatttacagaaacaaaatgtcactgaacaaaaattaaagaaagtcattactgatttacgaggaggcgagcgtgtgacatctaaaaaccaagaagataattaccaagcgcttgaaaaatacggaacggatttaatcaaagcggtccgttctggcaaaatggatccagttattggccgggacgaagaaattcgagatgttattcggattttgtcacggaaaaccaagaataaccccgttttaattggggaacctggtgtcgggaaaacggcgattgttgaaggattagcgcaacgaatcgtccgtaaagatgtgcccgataatttaaaagataagacaattatttcactggatatggggactttaatcgccggggccaaataccggggtgaatttgaagaacgacttaaagctgtgttaaaggaagttaagaagagtgaaggtcggattctggtcttcattgatgaaattcacacgattgttggtgctggtaagactgaaggtagcatggatgctgggaacctcttgaaaccaatgttagcgcgtggtgaattacacatgattggtgcgacaacgttggatgaataccggcaaaatatcgaaaaagataaggcgcttgaacggcgtttccaaaaagtgctagttcaagaaccatccgttgaagataccatcagtattttacgtggtttgaaggaacggtttgaaattttccacggtgtccggattcacgataatgccttagtcgcagctgcgacgttgtcaaatcgctacattacggatcgattcttaccggataaggcaatcgacttagtagatgaagccagtgccaacattaacgtcgaaatgaattcacaaccaacggaattggatcaagcaacgcggcaattaatgcaacttgaaattgaagaagaagcgttaaagaaagaaaccgacgccgcttcgcaaaaacgattggctgagacgcaaaaacaattagctgatttacgcgaaacaacgaataatttaaagatgcggtgggaaactgaaaaagaagatttgaaccgcattaatgataaaaaagcggaaattgatgctgctaaacggcaattagaagaagcacagggaaattatgatttagaaacggctgctaagttgcaacacggcacaattccacaattagaagaagaccttgccgaccttgaaaaggctgaaaagccagaggactggatggttcaggaatccgttactgaaaatgaaattgcaacggtggttagttcccaaactgggattccagtcgccaaattagttgccggtgatcgacaaaaattactgcgtcttgccgatgttctgcatgaacgggtaattggtcaagatcaagctgtcaatgctgtgacagatgctgtattacgttcacgggctggcttacaaaatccagaccgtccgcttggctcattcctcttcttaggaccaacaggggttgggaagaccgaattagcaaaagctttagctgaggatttatttgattctgaacggcatatggtccgcattgatatgagtgaatatatggaaaaatattctgtatcacgattggtcggtgccgcaccgggctatgttggctatgaagaaggtggccaattaactgaagcggttcggcggaatccatacacaattgtgttattggatgaaattgaaaaagcccatccagatgtctttaacattttattacaagtgttggatgacggtcgtttgacagactcacaaggacggacggttgactttaagaatacaatcatcattatgacttctaacttgggttctgaaatcttactggacggtgtagatgaagaaggtcaagtttcacaaacggctaaggaaagtgttcaagacttaattcagacgaaattcaagccagaattcttgaatcgaattgatgatacaattatgtttacaccattgagcttgaacgatattcaagcgattgtggtcaaaatgcttcatgatctatcagaccgtttgtcagatcaagaattgacattgacgatttcagatgctgctaaacaatgggtggcagaagaaggttacgatcctgcatttggggcgcggccattacggcgttttattacgaaccatatcgaaaccccattggctaaagaaattattgccgggcatatgttaccaggaaccacggttgaaattaacttaaaagataaccagttagtttttgaaaatcgctaacgattgaaaaagcgctgcaaatttaatttgcggcgctttttttggacatcaatcagggattattactgtcagattgatgtttgtatggtacacttattggggatgatgtacagaatgttagtgacgattaaggacgattccactttgaaagtggtgtcattaagagtcgttaatcaattgtttttctgtaattgacttgctcttagcggataaacatagtattatagaagtcgcggacaaaagtagcgggacacgtgatgatttaaaatcaatttgaatgggattgagataatccttgccaaattccccgagttcggtatatcattaatgaatctaagatataaaggagtctgaaaataatggcagttccagcaagaagaacatcaaagacgaagaaacgtatgcgtcgtggacatatcaaattgaacacaccaaacgtacaattcgatgcaactaatggcgaataccgtgtaagtcaccgtgtatcaccaaaaggtttctataaaggcgaacaagttgttacaccaaaagctaacgactaatcgtcatcgagagtttctgaataagaaactctttttttatgcagtttcctagttttaaatactagatggtggtataattagtattgaataaaaggagattgataattatgaaaaatgaacacttgaaacaaaagctcgatcgtttacaaattgtacgcttaccacgttggacagacctgcccgatttggaactatatatggatcaagtggttagttacatcaatcaatacctaaacgcgttaaatttagatgaaatcaccgcttcaatgattaataattacgtcaaaaaagaaattgtggcagcaccgattaaaaaacggtatacaaaatcgcaaattgctcaagttttaattattgcactattgaaaacgagtttttcgattgaagaaatcaaacaattgatgacagcggaaacacctaaccgaaatgaaaagcaactttatgattactttatcttaacgtttttagcagcgattcatcagttagatgaggattacagcccctatgaccaaggcaaaaatccagcaggtacattggtcactgaaccccaacaaacattgctgaaattagcatgtcagagtgtggtatataagattgcaattgggattactttgaagaaagaaccagttgaagaaaaaacgccagcaaaaaataagtaattgactagaaaatgagaattgaattaagattcacaaataattcaattacaaaaataatgaattcgtttacctctttctattttcgccgtaaaataaaggtaactaattagtttattaacaaatgttagttaactaatttttattcagaggattaatcattgtggttaagtctgaaaaaaatgaaagaggtgttttaggtggcagaaaagaagaagacgaataagttaacgcttggtgcgcttattctaatggtctttacgtcagtctttggatttacgaatatcccacgtgcgttctacttgatgggatatgcatcaattttttggtatgttttagcagctgttaccttctttattccttatgcatttatgctcggagaaatgggagcggcctttggtgaagcaaagggggggatttactcttggatggagaaatccgttaacgctaaatttgcctttgtcggcacatttatgtggtttgcttcatacattatctggatggttaacgtcgggaacgggatttggattccattatcaaacgcctttttcggggttgataaaacacaagaatggtcaatctttggtttgacaaatggtgtgcaaacattaggaattttagctattatttggatcattgtcattacctttgtcacatcaaaaggccttgataaaatcaagaaaatcaccagtattggtggttcagccattacgttaatcaacgtgattttattcttgggtggtttgttaatccttgttttaaataaaggggtaatggcacaacctgttacaacccatgcattcttccaatcaccaaatcaaagctatacatcgatgattcaagtcttcagtttcgttgtatttgcgatcttcgcttatggtggtcttgaagttgttggtggattagtagatgaaactgaaaacgctaaggttaactttccaaaagggttagctatttctgctgtcgtgattgttgtcggctatgctgttgggatttttatgatggggactttcactaactggaacttcgtctttaccaatggtggtggcttcgccaaagcaaccggttcaaacgcaaccgttactttggggaacgttgcttatattgccatgaacaacatgggttaccaattagggttagcaatgcacttaagtgaacatgctgctattcaagttgggatttggctcagtcgttacatggggctttcaatgttcttagcacttagtggtgctttctttacaattattttctcaccattaaaaacaattatcgaagggacacctgctgccttttggcctaagtcatttactaagaaaaatagtaataatatgccggtcaatgcaatgaaggtccaagctgcaattgtaattgtgattattgccttcgttgcttttggtggtaagagtgctgctaagttcttcgatatcttaacagcgatgacaaacgtttcaatgacattgccatacatgtttgtggcatactcatactttggctttaaaaaggatgaaagtatcgaaaaaccatttacaatttataaagggaagaccttctataaattctgtgtctgcatggtcatgttcacagttggttttgcgaacgtctttacgattattcaaccagcaattgatggtaatttaagtcaaacaatctggtcagttgctggccctatcttcttcacaattgttgcattatatatgtttaaccgttatgaaaagaaaacaaatttaaaataagtttttaaaagagcggccgttaagtggtcgctctttttgattggtcttaaaaaatgtgacacttcgtcgttttcgcttgaattgtgattctaaaagggttaagctaagatttcaatgagttaaatttcaatgaaaaggtgacgaatatgaaaaaaacaattgttggtttagtgaccagcttagggctaatcggtctattggctggttgtgggacaaccaaattaacaacgactaaaacaaattatcgccaaaatggaatggtggcagtcgtaaaaggttcaacaaccaaaaaagctgatttacaataccggattaatcataatcatttccaaaaagcaacggtcaaagacggaacttatgtgattcaagtaccaacaacgactaacaaacaaacagtaacggtacaagctaaagcaaacggtaaaaccgttcaaaagaaggtaacgattgcagcgggcacatcagttggccaatatgccaagattgccgcgcaatacaaccaggctttaattgggatggcgttatctaaggcagatcaaaccaaagcgcaggaattgcaaaaacaagcagcagctgccaaagcaggccaacttgcacctgctgatctgatgacacttaagcagcggcaacaggaagtacaagcagcaatgcaacaggtgcaacagacacaaaaggatcaattgctaccaaccacacctaaaaatggggtgactgaatgggtcgcaacaaagcatgtcaccattcgcggttctgttgatagtcaagatgtaatggggatgacgctcattacacccgttaaagcgctcaaagataaagcggcattgaaagattttgggaccagttttgcattgattgcgcaagcaacgggcgctgattccaaaaaagtgatgtccgaatttagcgattatacgaagaaaaacaaaaaaggtagtcaaaccacgatgaagacgattgaatcaaatggtgtgaagttcaataccggtttttcaacaagtaatttgtatatttacattacaaaataaacgtaaaaagggccgcaacataaagttgcggcccttttttgtgctttatttagctggatcttttggtaagacaagaggtaagaagttgagcaaaagcccaaaaataactgagacgataacagttgtttgaatgttaaagccggttttcgttagtttagaaccgataaatccaatgacaaacccaaaaatcaatgtccaaagtagattcataacgtatttcatagttggccttctttctttgattcaattctatgatattgtaacacgttttccaaagagaatcatttgaaataatttgttatactaagagtaatcgaattaacgaagaaagaaggggcgttgcttgccattcgttcaactacaggttaagagtacctatacgctcttggaaagtaccactaaaattgatgcactgattgaaagtgctaaggcgcgcggctatcagagtattgcgctgacggataagaacgtgatttatgggctagtcgatttttataaggcggccaaggcagctgacttacatccaatcttgggtttaacgcttgaaattggcggattacttcaaaccgatgaacggtttccgctaattgtattggcgaaagatttagttggctatcagaatcttttgaagctttcttctaaagtgatgactcaaactgatctggtttcatttgctgatattacacagtggttcagccatttagtagtgatcacaccggctcaagatggcgaattagtccgcctacttttgcaagcggaggagcaaacaacggcatatttgacgcaactccaggcggcagttgatccggggagcttgtatttaggaatcagtgccaagcgagcagcagccccccaacttagcgggttaattgcattgagtcagacgaccggagttccgctggttgcgttaggtgatgttcgttatctagaaccagatgatgctttttcagtgcaagtcttacaacatattaaagctggtacgcaagttaatctccatagtggtgatcagacaacgccaggcggctattatttacaagctgctgatcagattacggccgagtttgaagcattgcagttggtcgaggccgtgcacaatacggataagattgcccaactctgtcaagttgagttgacctttaagcgggcccaattaccacgctttgaaacaccgcatcaagagtcggcaacggcatatctagaacagttaagtcagcaaggcttacaagttcggtttgccgatcaagcgattccgcaagaatatcaagaacgcttgcagtatgaattgcgagtgatcaacgagatgggctttgccgattatttcttaatcgttgccgatgtcatgcggcatgcccatgaacaacatattatgacgggcccagggcgaggctctgcggcagggtcgttggtggcctatgctttaatgattactgatgtcgatccgattcaatatcaattgttgtttgaacgttttttgaaccccaatcgggcgaatatgccagatattgatttggatatcccagataatcgtcgggatgaagtgctggcctatgtctatcacaaatacggtcggaatcatatggcgcaaattattacatttggcacactggcagctaaaatggcgttacgtgatgtggggcgtgtgtttggcttaagtcagtttgaaatgaatgattgggctaaggtaattccggacatgctgaaaatcacgttaaaagaagcttatcaacaatcacaaccattgaaaaatttggtggccgattccgctcaaaatcgattactattcgagacagcacagaaacttgaaggactgccacgacactactcaacgcatgcggctgggattgtgttaagccaagcaccgttaactgatacggttgcattacaaagtggcggtgaagagattgaacttacacaattgccaatgggcaacgtggaagaactgggcctactgaagattgactttttaggattacgtaatttagggattcttgctaatattgtaaagcttgttggacagcaaacgggacagccgtttgacccacactcaattccgttggatgatcctaaaacacttgcattattccaacatggtgatactaatggtattttccaatttgaatcacttggcattaagaatgttttacggcggttggcaccgagttcttttgaagacgtcgtggcgacaaatgcgttgtatcgaccaggtccgatggaaaacatcgacgtatttatcgctcgtaagaacgggcaagaacctgtcacttatccggacgcgtcgttagccgatattttagagccaacgtatgggatcttagtgtatcaagaacaagttatgcaggctgcgtccaagatggggggctttagcttaggcgaagccgacttattgcggcgagcaatgagtaaaaagaagaaggcggtgattgatgctagccggacgcaatttattcaaggcgcactcgaacgcgggcacacagaaactgctgctacgacagtctacgactatattgagcggtttgccaattatggatttaaccggtcacatgctgttgcttatagtaaaattgctttctggttggcttatttaaaggttcatcagccagcagccttttttgcagctttattaaatgccgttttgaacaatccgacaaaaacgaaaacttacttagcagaagctaagaaacgtcaaattaaagtgctgccacctgatattaaccgcagtcaaagttatttcagattagccgactcagggattatctttggtttgttcagcattaaaaaagttcggcgcgattttgtggcggcgattattcaagaacggacaacgaacggaccgtttaaatcgttactggccttcttacagcggatggatcctaagtttctcaagcaagaggcattagaagccttgatttatagtggcgccttcgatcagtttaatccgaatcggaatgcgctgttgaccaacttagccgacctgcttgatagtgtgaagttgtcagggaataacgtcgatttatttgctgttttagcaccgaaagaacgtgccgtaccgaatttaaccttgactgaacgattggataaagaagctgaatatcttggggtctatgtttcggggcatccggtcgaaaaatatgatcgtgtacgccaacactaccatgtgcctgatatcagtgatttggcacccgagcagacggtccatttggtgctattcattcgccgaattaaggtgattcgaacgaaaaaaggcgatcaaatggcgtttgtaacggggcaagatgcaaccggtgaaattagtgtgacgctctttactggcgtttatcaacgggtcagtaaatggctacaaacaggacaagttgtttttatcaccgggaaagttgaacaacgtcgcgatttacaagtggttgctaatcagattcaattggcacaagatgcacaaaagacgctacccaaagcgaccctttatttacgggttcaaacggcgttgacgagtcaagcgcaacaacaaatgtatcaattgttacaacaaaatcaaggaacaacgccagttatcttgtacaatgcggccgataaacagtcaattctattgaacgagcgctattgggttgtgagcaacgaaaaactaacgaccgcgcttacaaaccttttagggacgggaaatgtgattttaaaagggtttgaccaataaagaaattggtctatctttgcgaaaatcttcgcaaaagacaagacttattttctgaaaagtgataatatattagtgactttgaaagaccaattggttttttaagtaaaatatttgcctggggtgaaaagatgaaacgcataggtattttgacaagtggtggggatgcacctggtatgaacgctgccatccgtgccgttgcaagaaaagcaatgcatgaaggccttgaagtctatggtatcaattatggttacgctggtttagttgccggagatatcttcaagatggacccaattacggttggtgacaagattcaacgtggtgggacattcttgtactcagcacgttatccagaatttgcacaagtcgaaggacaattgaaaggtattgaacaactcaagaagtttggtatcgaagctttagttgtcatcggtggtgatggttcttatcacggtgcacttcgtttaactgaacatggttataacgcaattggtcttccaggaacaattgataacgatattccatttacagatcaaacaattggtttcgatacagctgtgaacacagtgctcgaatcaattgaccggatccgtgatacagctgctagtcacgaaagaactttcgttgtggaagtaatgggtcgtggcgctggtgatatcgcgctttgggctggtgttgccggtggcgcacaagacattattatccctgaacatgatttcgacgttaaggccgttgctgataagctacgtacttcacgtgaacatggtcaaaaacacgctgtcattgtattggctgaaggtgtgatgcacgctgatgaattctcagaaaaactttctgaatacggcgatttccacttacgttcaactgttttaggacacgttgttcgtggtggggcaccaacagctagtgaccgtgtgttagcaagtcgtttgggctcaaaagcagttgaattattgcttgaaggcaaaggtggcgttgcacttgggattgaaaagaacgaaattatcgcacatgatatgttagacttgttcaatcacaagcatcacgcaatgttagatctttatgatttaaacgaagatttagcttactagattcatcgttccatatataaaattgttaaaacgactgaaaagtcttttaaaaaatagacataaaaggagagattccacttatgaagaaaaccaaaatcgtaagtacacttggacccgcaagtaacaatgttgaaactatcgcaaaattaatcgaagcaggtgctaatgtattccgctttaacttctctcatggtgatcatgaagaacatttaagccggatgaacatggttcacgaagctgaaaaattaactggtaaaacagttggtatcatgttagatacaaagggtgctgaaatccggacaactgttcaacaaggtaagaaatttgaattacacactggtgaagtggtacgtatttcaatggacgatacacttgaaggaacacctgaaaaaatcgctgttacttacccaggtctatacgacgacacacatgtcggcggacacgttttaatcgatgatggtttagtggatcttaaaattattgaaaaagacgaagcaaacaaagaacttgttactgaagttcaaaacgacggtatggtcggctcacgtaaaggtgttaacgcacctggtgtttcaatcaacttacctggtatcacagaaaaagatgctagcgacattcgttttggtttagatcacgaaatcaactttatcgctgcaagttttgttcgtaaacctcaagatgttttagatatccgtgaattattagaagaaaaacacatggaacatgttcaaatcttccctaagattgaatcacaagaaggtatcgacaacattgacgatatcatgaaagtttcagatggtttaatgattgctcgtggtgacatgggtgttgaaattccatttgaaaatgttccttttgtacaaaagaacttgatcaagaaatgtaacgctattggcaaaccagttatcacagctacacaaatgttggactcaatgcaagaaaacccacgtcctacacgtgctgaagttaacgacgttgctaacgctgttattgatggtactgacgcaacaatgctttcaggtgaaagtgctaacggtgactacccagtagaagctgttgcaacaatggctcgcattgatgaaagaacagaaaaatcattaacagaccgcgatgcatacgcattgaaagcatacagcaagactaacttgacagaatcaattggccaagctgttgctcacaccgcacgtaacttaggaatcaagacaatcgttgctgctacagaatcaggctcaacagcacgtatgatttctaaataccgtccacaagctgacatcttagccgttacattcgacgaacgtacacgtcgtggtttaacagttaactatggtgtatacccagttatcgctaagaaacctgctaatacagatgatatgttcaacttagctacacaaacagctcaagaacatggttttgctaaagaaggcgacctaatcttgatcactgctggtgttcctgttggcgaacgtggcacaacaaacgttatgaagatccaattaattggttcaaaattaacacaaggccaaggtgttggcgatgaaacaatcgttggcaaggctgttgtcgcttcaaacgctaaagaagctgctgaaaaagcaattgatggtggtatcttagttgttaaatcaactgacaaagattacttaccagcaatcgaaaaatcaagtgctatcgttgttgaaaacggtggtttaacatcacacgctgctgttgttggtatcgctatgggtattccagttgttgttggtgctaaagacgcaacagaagctatcaaagatggcgaagttgtgactgttgattcacgtcgtgggattgtttaccgcggtgcaacaaacgctctttaatcattcctgaatgatgaaatgaagccccctctgaaaagagggggctttttttgttttaaaaacgcgaatcttgaattacttttctgaaaatactgacaagtcgttcatttatcggtacaatagtagggagactttattggaggtttacatggaaagttggttatttttagtagcgattttaatcgttgcattgttagcgaaaaatcaatctttaatcattgcgaccgcggttgttttaatattaaaggtattcccgatttcaaataaggtgctgcctgtgatccaagccaaaggcattaattggggagtgacagtgatttcggttgctatcctagtcccgattgcaacggggcaaattggtgtcaaagacttaatcaatgcctttaaaacgccggcgggttttattgcagttggttgtggcgtgttagttgctgtactatcagcgaagggtgtggggctattgtccgctagtcctgagatgacagtggccttggtttttgggaccatcatgggtgtcgtttttctaaaagggattgcggctggccccgtaattgcagcggggattacttataccattttaacggtctttaatttagtaccaattcattaattaataagaataaaagaggttaactatgaatgaattaatcgggcaagtcattactgccttagtaacagatgaaaatgaaacagccttctttgtccaaaaagacggcgtgacatttgaattaaaaaaagaaactttagaacaagaattgacaatcggtgaaacggtgactggttttgcttatgaaaactcaagtcgggaattgatcttatcaacgtttattcctaaatcacgcgtgggccattatgcctttggtgaagtggttgaaacgcggcgtgatttaggcgttttcgtcaatattggcttgccagataaggatattgtcgtatcactggatattttaccaaccattacgaaattatggcctaaaccaggtgatcgtttaatgattgcgattgaagtcgatcaaaaagggcggatgtggggccaactagctgacgaaagcatcttcagatcaatttcaaaaggtgctaaaccagaaatgaagaaccaagacgtgatggggacggtctaccgtttgaagttagccgggacgtttattttaacggatgacttttacattgggttcattcatccttctgaacgtgaagcagaaccacgtttgggtcaacaggttaaggggcgcgtcattggtgtgcgacctgaaggtagtttaaatgtcagtttgaaaccacgggcatatgaagaaattggcgacgatgctgaaatgattatggctgtcttaaaacggcaacctgattacgcaatgccatacactgaccggagcgatccagaagcgattaagagttactttgggattagtaaaggcagttttaagcgggcattaggccggttaatgaaaaatggcttaattactcaagcagagggcctaacgagtttaactgaaaaaggtcaagctgatattgccccaattacagatgacgagaagcaagactaagcttttttgaatgattgaaaaggaagttgctaaatggataaagctgagcaattagaccgaatatccgagcagctacaagcggccggctacaagttaacagcacaacgctctgcgacggtggcggtcattttggaccatgcccaagcgcatctgagtgccgaacagatttttatggcaactaaagaggtggtccctgaaattgggttggccactgtgtatcgcacccttgagatgttgacggaactgcatgtgttgaataaagttcggttcattgaagatgggatgacccactatgacttgtgtgagactgatcacgaccatcatttccaccatcacctgttgtgtctgcaatgtggggcaatcgaagaaattcatacggatttattgcctgccgtggaacaacaggtatatgatgattacacatttacggtgttagatcatcgtttaacatttcacgggatttgtgcacgttgccaacagattaaccaacaaaatgggttaccagccaatcaactggatcctagtcgccaaattgacgtgacgcagttgtaaaagaggaagcacatggatgatttaattcaagattatttacattatttaaaagttgaacgcggtctttcggagaatacgcgccagagttatcggcaggatttacaacagtttgcggcgtttttacaacgtcagcaggttgccaattttactgaagaccgctttttaattttgaactacttgcaagaacaaactgatgtgcataaggcacaaagtagtattacacggagcatttcaacgttacgtaaattctatcagtatttagcgcgtgaaaagcagattaaacaaaatccgatgctccaaatcgattcgcccaaacaaggccgtcatctaccggctgttttatcgacggcggagattgagcgactattggcggcaccagatacgagcaccgcacttggattacgagatcgagcgattctagaggttttatatgcgacggggttacgagttagcgagctgattcatctaaagatggctgatttgcatttatcactgggcttaattcagaccctcggcaaagggaataaggaacggattataccgattggtgatgtagcggttgattggattaatcaatacctcgatcgtagccggaatcaattaacgaaggggcgtgctaacccgtacctgtttgttaatttccatggtaacgggttgacgcgccaagggatttggaagaacctgaaggcacatgttaaaacggctgggattgaaaaagacgtgaccccacatacattgcggcattcgtttgccactgtgctacttgaaaatggcgcagatctgcgaattgtacaagaattattggggcattcagatatttcaacgactcaaatttacacgcatattagtaagaaacatttgacagaagtttaccaacggagtcatccacgcgattaaattagatttgtcgcgctttataaactatggtagagttaatgctattagaactttgtttgatcaatggaggtcaacatgttattcaagtataaaaatgattatgaaaagattgcgatgggctttttatccttcgtaccggatttaaaagaagtcagtcatgtacaagctgaattggcgctctatacgtcggatgagcaacgcaatttatatttatggcgcaatgaagccggcgattttgccggtgttgtggggattgaactgggtgcggactatattttagtgcgccatatttcactgaacccttcggaacgtagcgacgagaactatttcaccatgttggatgaattagcggcgctttatcctgaaagtcgcgtgatgggttcgttagagactgcgccattgattgctaaatgggaacaacatcagaatacagaaatggactagattgaccaatgactgaacaattaacgttggtcttgactgattttgaaggaccactcgatttattattacatttaattaagcaaactaagattgatatttatgatattcccattgctgaaatcaccgcgcaatatcttgattacttgcaccaaatgcaagtattgaaactagatgttgcaggtgattatttagtaatggcggcgacgttgatgaagattaagagtaagttgctcttacctaaggcacctgaattaattgaagaagaaacagaagaatacgtcgatccacggcaggaattagtggaccaactattggcgtaccaagccttccaaaaggtcgcaacggttttgcaagagcgcgaattggagcgccaacagctctttgctaagccagctagtagtaatccagctgaaaaagtggtcccactggcgcgcggcgtgattaagccacgcgatttagcggccgcagtttctaaaatgttggtcgaagcccaagctaaacaaccggtcttcaaaacggtccaaaatgacgaaatttcgattacggataaaatgagttggattgtgcgtcatttagccgctcaaccagttgcttttgaagcgttggtcgttgttaaaacagatcgagatgaaatcgtcacaacatttttagccgtactagaattgatgaaggatcgaaaaattatttgcgaacaagccgactatgatgcaccaatcatggttcggttgaaggagggcatttcagttgaatcatctcgctgaaattgagagtttattatatgtcgcgggggacgaaggaattgcgcttgcgcaaattgcgcaacttattcatctcgatgaaccggcagtccgccagttattagaaaaattggcaaatcgttaccgcggcaacactgaatcgggtttgaacctgattcaagccgaagatatctataaattagtcaccaaaaaagaatacgcgacgttgttgaagacctattttgatggaccggtgtcaactagtattagtcaggccgctcttgaggtattggcaattattgtctatcgccaaccaatcacgcggattgaagtcgatgaggtccgaggtgttcaaagtagtggggccatccaaaccttgttagcccgccaattaattagcgaaaaagggcgtaaggatgcgcctggtcggccaattttatatggaacgagcacctatttcttagattactttggtcttgaatcgctcgatgaattaccaccacttgaacaattggcacttgacgctgatgtcgatggtagtgaaggtggtacagcagacttgtattaccgtcaatttgaacaaacgttaaatgaaacagatacgacgtcggaagagacgtccaaaggagaacaataaatggaacgattacaaaaagtgattgcaaatgctggggtagcttcaagacggaaagcagaaaccttaattgcaactggtcacgtcaccttaaatggtaaagtggtgaaggaaatgggtatcaaggtggatagcacaagcgatcatattgaagttgacggtgtgccgttaacgcgtgaacgcaaggtctattatgtcttgtataaaccacgccaagtgatttcagcagtgacagatgataagaaacgccgggtcgtcactgaataccttggcgatatcgttgaacgggtttatccaatcggccgattagattacgatacatctggcttattactactaacgaatgatggtgattttgccaacatgatgatgcatccaaaatataaagtcgacaagacttatattgcgaaggtttcaggattaccaactgcagatatgttgcgccaattgcgtaaaggaattgtcttagaaaaacgcaaaacagcaccagccaaggtcaaagtaatttcaactgatcggcgtaagaacactgccattgtaagcatcaccattcacgaagggatgaatcatcaggttaagaacatgctagctgcggttggcctacccgtaacaaagttgaaacgggaaacatatggtttcttaacgttagatgggttagtttctggcgaataccgtgctttgaaaccaatcgaagtcgcagaattcaaaaaaattgctgaactaaatgaaaaaccacagcataagaatcgaccaaaattatcacggcatgattaattagttgcttttggcacgttgatttgctatgcttatttcgaacaaaatattaatggttcgtcttcaggggcagggtgtaattcccgaccggcggtaaaagtccgcgacctgctacaatgttgattcttgtggtggctgaactggtgtgattccagtaccgatagtgaaagtctagatggaagaagatagggcttatttgggtatgaatgtatgcaagtaaggtctgttaatctccctgattaacagacctttttgatgcaatcagacttggctaagtccgctgacgaaggcaacctcatctggagggtgttagtaatgcaagtttcaaaagttcgtacgatgattggggtcgcaatgctaggggcaatttcatttgtcgtcatgtttttcgaatttccaattattctcgcatttccgtttttaaaaattgattttagtgacgtgattgtcctgttagggacgttcgtttacggaccaattggaggaatgggggtcgcattgattcgctcgacgcttcatttcattatgaccggtgctagcttaccgagtttggtcggcgactttgccggtgtcttggcgtcaatctgctacttgttaccattctattatttattcaatcgtcaatcgaacgttttagtaggtcaagcaattgctggtgttgcgggggctgtcagcatgacgatcttcatgtcatttgctaactggcttttcattttaccgctctatattaaattgatgggtttgaacttaggaatgtcgactaccaaatacattctatttggattagtaccgtttaatttaattaaaggtgcactcgtaacggtggtgtttgccgttttatatttacggattttaccatggctaaaacaacatatgcaaaaaccaattgccaaataaatggcagcaaaaaaggttgtgtccaagcgggcacaaccttttttataggacgtaaatatgctacgataaaaatggcgttgattggcgtacaatcgcaccagttggacaggcggtgtaggcggttttaaacgcaattcgttctttaggatcttcaattggcgtcgttccctgattatgatcgggtttaaaaaaggcgatcccttcttgatcgtaatcgaataagtcgggcgcctttagctggcagagaccgcaggcgatacagcgttccgggatgacttgactatagagcattaaattcacactttctcaataaaggacttaattgatgatgttaatggcgtatctactatgcttgttggcgcctgagaaaaggcggtatcaagcaatctactataccttaattggtaaacgaactacttcaaatctgtatgccggtttagcatatggattattaaaatggctccaaatttatcctaatctagaacaggcacaatttcaagcagaattaaaacgacttcagcaaaatggttggattgaaatcgatgagcggtatgtttggttgactgctaccgggcaacaaaaacaagctgaatggcagccgcaattagtttggccgacgcactatgaaggcccacagatgggtcacttaccccaattcactgctcgttttatgttggccgttcaaattgtgtcggaatatcatcatcaaaatacgcagtactatccattggaaacgagtatgaaggaccgcgtgttggtggtcagttggtttaagcggcataaggcaaccatcaattttagcagtcaattccagctagaattggcgcaattacttgaccagttagatccgcaacaagccgatcttgtggcaaatcaactgatcggacatcaagtcttgggcaaaagccaccaacaactggcgcaagccttagatagcccatccttgacagttcgtgtgcggaccatcgacgcctttgctcaaattttagggcttttattggcgcaccaaacgacttatccgctattgaatgaattagtggatcaggctgaaacgcaattgagtcagagtacgttacagacctggcaattgatccaacaaggggcgagtgttaaacaaatcagccgccagcgccgggttaagatcggaacgattaaagaacaccttttagaaaccgcgatgttactcccacggtttccgtttgaacaattcttaaaggatgcaactacacaaaaactagctagattgatgactgaacagccatcgctcagctataatgaagcacaaaccgcactccccggtctagatttctttgagtatcggctttatcaaattcaaaggcaggtgaacgcccaatgagcacggatgaactgatttataaaacgctaaaagagcggtttggctatgagacatttaagccaggacaattagaagtgattcaatctgttttggcgggccaagcgactttggcggttttgccgaccgggacgggaaaatcattatgttatcaattaccagcctatcttttgggccataccactgtcattatttcacctttaattgcattgatgcaagatcaggtcgcacagttgaattaccaaggtgaaaaaaaggcagtcgcgattaattcaaatttggaaccgcggcaaaagcatgcgttattgcgacaattgccacagtatcgtttcgtgtttatggcgcctgaaacgataagccagccggcggtcattcaagcactacaacaatgccagattgatttattggtcatcgatgaagcccactgtatttcacaatgggggattgattttcggccggattatttagtgcttgcgcaaatcaagcaccaattaaatccgggggcaacgctcgcactaactgcaacagctgatgcacaggttcggcatgatattttagccaagctagatttgcagtcggccaataggattattacgtcggttgatcgtcctaatatttacttaggggtgagtcaacaagcggatgaagcgagtaagaacgcctttttgcaacaattggtaactgagagtcaggggcccgggattatttatttttcaagtcgtcaaaagactgtcgagattgcggcttttttgcaacaaaagacagcgatgcgagttgcctattatcacgcagcgctttcgccacaggagcgcttcattattcaacaacagtttatgcaagggcagttggacgtaatctgcgcaacgaatgcatttggaatggggattaataaagccaatattcgctatgtgattcactatcatttaccgcaaaatatcgaaagttatctacaagaagtcggtcgtgcagggcgcgatggccaaccagcctatgcaatgttgttagcaacaccgcaagatacgtatctgcaacagtcgttagtgtcatttgggattcctgaagctggattgattcggcgtttctatcaagaaccgacattatttaaacaaagccaaggcaacgagtttgaattattacggcggtatcagcaaattgggatggatgaacaggccgttagtgaactgttacagaatcggcaaaaagaaaagcgttttgcgcttcaaacaatggttgattatttaaacttacaaggctgtcggcggcaatttattgtgaactattttgacgagcaaccccaacaggttgcccatgctgatcaatgttgtggtcaacaggattcaacggtctttttagaaaaatttaatttaaaaacgttaactgatgataaatcccctaaaatagacgggttagaccattgggacggtattttgaagcaattgttttagagattttctgggtattttaaaagggtctatggtacaatatcaaagaataccaatagggagggccgtcaatgctcaaagatgataagaaaaaattagataatcagacggaagacaaaccctgggaaagccagtttgatgatgatcgtgatgatcgcgggaatttatcgcgtgttgcttccaagagtaaggaaaaaggaaatacatattttgccattattctaggtgtattgcttgttttaatgattgcatttccgattattgcctatacgattcattctagccgggctaaccgcccagtcgagtctagtaagattgtcgttaatacttctgatagtgatagtgcttctaagaaagaagctaaaaaagcgaagtctgctagcgaaagtgctaccaaagcggccagcgaaagtaaagctaaacaggctgaaagtgaaaaagcggctagtgaaagccaagcagttgaaagtagcaaacaagctgcagaagaagctgaaaaggctaatagtcaaagccaagctcaagcagacgctcaaaatagtagtagcgaagaaacaacaactgaaagtagcagttcaagcgaaacaacgggtggttcttatacgttgaaagccggcgaaggtttataccgcgcagcggttaataacggtttaacactcgatcaactacttgcattaaaccctgggttaacagccaattcacaagtggcaccaggcacagctctaaaagttaaataatcagtactaccaaaaggcctggggaaactcccagccttttttaatgattttttcaggaggcagaacatgcaaattgcaattgatggaccagcatcatctggtaaaagtacggtcgccaaaattgtggctactaaattagggttcgtatacgttgatacgggtgctatgtatcgcgcatcaaccgtgttagcacagaaattagggttagacttcggggatgaagcgggaattttagcagctttaaaagaagcagatatccaatttaaacctgaccaagcagggcaaaaagtcttcttgaatggtgaagatattacattagccattcgaacccctgaaattacgaataatgtctcacaagtatcagctttagctggtgtgcgcactgagatggttgcacggcaacgtcagattgcagatcaaggtcaagtcgtcatggatggacgcgatattggaacaacggtgttacctgctgcgaaggttaaaatttttatggtggcaagtgcccaagaacgagctaaacgccgttatgctgaaaatacagctaaggggattatgacgcctttagcaacgctacaagcagagattgaattacgtgatcaaaaagatagtacacgggccatttcacccttaaaaaaagctgacgacgccattgaaatcgatacaactcagttaacaatcgatgaggtggtcgacacaatattagcaattgtaaagaaaaatatgtaattttatctttgaacgaggtaaaataactggtaatccgaatagatatcaactaaaatagtaactgtatagatagtcgttaaggaggattttagctatgagtgaagctaatttgaataacacccaaagcagcgatgcaatggcagctgctttagacagtgtccacgaagtcaaaattggggacgttgttaaaggtgaagttttagcaattgaagatcgacaagtgattgtcggcatcgaaggaactggtgttgaaggggttgtgcctcaaaaagaattatcaagtcaacctattgaagacatcgcagacgttgccaaagtaggcgaccaattagatttagtggtcatttcaagaatcggtaacgataaagaaaacgggagctacttattatctaaacgtcgcttagaagcccgtaaagtttggtctgaaattgaacaaaaatttgctaatcaagaaacaatcacagctaaagtcatcgacgtggttaaaggcggcttagtcgtcgatgctggtgtccgtggcttcgtaccagcttcaatgatttctgatcgtttcgtacgtgatttaagcagctttaaaggccaagaattaaccttacaaattattgaaattgaaccaagtgaaaaccgtttaattctttcacgtaaagcattattggaacaagaacgtcaagctaagttacaagcagtttttgaaaaaatgttacctggggatgttgttgaaggtgaagttgctcgtttgacaaactttggcgcattcatcgatttaggtggcgttgacggcttagtccacgtttctgaaatttcatatgatcacattaaccaaccttctgatgtcttagaagttggtcaaaaagtgcaagtgaaagtcttgagcttagaccaagaaaaaggccggatctcattatcaattaaagatacgcaacctggtccttgggatgatatcgctgataaagcaccagttggtagcactttagaaggggtcgttaaacgtttaacaacatttggcgcctttgttgaagtcttccctggggttgaaggtttagtgcatatttcacaaatctcacatcaacatatcgccacaccaaacgatgtgctagaagaaggccaaacggttcaagtcaaggtcttatcagttgatcctgaacaacaacgtttaggtttatcaatcaaagcattgcaagaaaaacctgctggtgctaaggattcagaacacaaagatgtggcgccttctgactatgtgatgccagaagaagaaacaggtttcagtatcggcgacatgcttggtaaaacattagacgataaataatttttttaaaagttatatgcaaaaaggtagggtctgggacaaaactaggttttgtcccagaccctacgtttatgtcggtgattgattagtacgacgcagaggaagcggaagttcagcggactttgtcggagtgaccttgtcagtttggctcagacagggtacactgaacaacgaagggaatgaatacaatgacaaaaccagttatcgccattgttggtcgacctaatgtcggtaaatcgacgatttttaatcgcattgccggtgagcggatctcgattgttgaagatacgccaggggttacgcgtgatcgcatttataccacaagtgaatggttagggcatgaatttagcctaatcgataccggtgggattgaaattagtgacgcaccatttatggaacagattaaacaacaagcagaaattgcaattgatgaagcagacgtgattatcttcttagtgagtgcacgagaaggggttactgatgcggatgagcgagttgcacaaattttataccgcgctgacaaaccgatcttacttggggttaataaggcggataatccagaacaacgccaagatatttttgatttctatagtcttggctttggcgaacccatcgccgtttcaggggctcatggtcaagggttaggtgatcttttagatgccgccgttgctaagttcccagctgaagatgacgaagaagaagacgatagcatcaagtttagtttgattggccgtcccaatgttgggaagtcatcacttgtgaacgcgatgttaaaagaagaccgggtaattgtctctcaaattgaagggactacgcgggatgccatcgatacgaagttcacggctgaagataatcaagaatttaccatgattgatactgccgggatccgtaaacggggtaaggtctacgaaaatactgaaaaatacgccgtaatgcgtgcattacgtgcgattgaccgttcagacgtcgtattagtcgttttgaatgctgaagaaggtattcgtgaacaagataagaaagtggctggctacgcacatgaagctggtcgtgggattatcatcgtggttaataagtgggatacacttaaaaaagacaaccacacgatgaaagagttcgaaaatcacgtgcgcgatcaattccaatacttagactatgcgccaatcatctttgtatcggctaagaccggcgttcgcttgcaaaacttgccagcgatgattgaacaagtgagtgaaaaccaaaaccggcgcatccaatcagcactcttaaacgaagtcttgatggacgcaacaacggtgacaccaactccagctattaatgggaaacgattgcgcatttattacatgacacaagtagcggttcaaccgcctacatttgtggtcttcgtaaacgatgttaacttgcttcatttctcatatcaacgtttcttgaagaatcaattacggaaaacctttgactttactggtacaccaatccatttgatccctcgtcaacgaaaataagctgttttttcaaaaatccgctaatatgattaactaatttgctcagaatgctgttttttagcgaaattccttgctatcactaggtttgtgtgataaattaaaaaatgaaatggtgatcaaatcattgtttcgtcatttttgaccactcaaaaatggtttcggtaattaattactgattatctgtgatgagcaggaggtgaaaaacatggcaaacaaagcacaattgatcgaaggcgtagcatcaaagactggtttaactaagaaggatgcaactgctgcagttgatgcagtatttggttcaatccaagacactttgaaaaaaggtgacaaagttcaactaatcggctttggtacttttgaagtacgtgaacgtgcagctcgtaagggccgtaacccacaaactggtgcagaaattaagattcctgcaagcaaagtacctgcattcaagccaggtaaagcattaaaggattctgttaaataagaattcaatttataggctgggatttttcccagtctttttttattggcaattaatccgaatatgttaaaatggaacaatcgaaaaagggtggttaaatgacgaattcagaacaaatgcttacagcattagaagataataatttagaacaagcacagacttacttccaacaagccttagttgctgatgaacccgatacgctctacagcttagctgaagagttatatgcgatgggttttttggaacaagcaacgacaatttaccaacaattgttggcccaatttcctgaagaagatcaaatcagaacaacactagcagatattgcggtcagcaatggccaatacgacgacgccttgaacttgttggcagatattacgccagaatccaatgcgtacgccgaaagtctgctgacggcagctgatgtctatcaaacaatgggcttaccagaagttagtgaacaaaaattattgacggcgttgcgcctatatccagatgaacccgtcatgcaattcgcattagctgaattgtactttgaaatgggtgaatatgtgaaggccgccaattactatgagacgctcatcgaccaagacgttgttgaactgggacaggtgaatattcaaaagcggttggcaactagttatgccagcagtggggcttttgaagaagctttgcagatttacgaagggttgacgccagaatttctaacagaagacgatcaattccagatgggctttttgtacttacaaattaaggattatcaaaaagcaattgaaatcttaaccaagttacagacgactgatccacaatatacgtcactatatacttacttggcagcagctcaagaggctcagaatcaattagaagacgccttaacgaccgttcagaccggaattgggtacgatgcctacaacgaggtcctctatcaaaaggggagcgatctagcgcttcaattaggcaataacgaggttgctgaacagatgctaaacgaggccctcaagattgatcctgataatatgggcgaaattagtgccttgagccaagtttatcgccgtcaaggccgccatgccgaaaacattgctttcttacaagatgcgattgaaaatcataaaccaacggctgatttatattggtcattggcgcaatcacagatggcggtggatgatgttgaccaagcgcgcgaaaattatctgttagcttatcctgacttgaaagataactcggactttctacacgatttaattttattcttccaagaaatggcacaggtcccagaaatgttagcggccctcaaacaatatttgaagctcgtgccaaacgatttagagatgcaaactctctatgacgattaccaagccatgcaataatgcaaaaaaacgcccgactattactttagtcgagcgtttttttgcgtctttagtcgcgtttcttccccagatgaaagtggtacattgaagaggaatcgggaacaggatttatttggggaggtttttaggatgacaaacacaatactttcggttgcccaactaacacaagtggtgtcaattgggcagtctgaccagacgacaaccttattgaaaaatatttcgtttacggtgcaaaaaggggagttggtcagtattgttgggccttctgggtctggtaagagtacgttgttgtattgtatttcagggattacgcgacctacaggcggcactgtggcaattgcggggattaatccgtatcaattgaaacccaatcaactagcggcttttcgcagacagacgattggctttatttttcaacaatacaacttgattcagtctttacccgtctttgaaaatgttgtcttacaacagcgcttgagtcatcagcaaccgcaacgtgctgagattaaacagttactgaccaaaatgaactttgcgggacaaatcgatgggcctgttgcgactttatcgggtggtgagcaacaaaaagtcgcgattgctcgcacgattctaactgattgtgatgtgctatttgccgatgagccaacgggtgcgctagattcggcatccaaagcgattatttttacatatttcaaagagatggttgctaaagggagaacggtgattatggtgacccacgatattgagctggctagtcagacagatcgtgcgattgtattaaaagacggtcaggttcagcaaattgtgactgaaccgacacttgcgacaatctatgccgccttggatcaggtggtgtaagcgatgtggacaatcagttggttacagttaaagcattcctggcggcaatggctagcaacaataccagtttttgtaacagtgggtttaatcctcggtttttgtttaacgggaattgtgaatgtggcacagtcgcagcaagttgatctatacggtccgaatacaccgttgccgatttttatcatgccggtattttttggtggtattacaatggtaatcgtgattaaaggaatcgtgcaccagcttttggatcagtttaaaacggactatcgaatgcttgcgattctaggggcaacgatcaatgcactggccgctattttggggatttaaatcggaattgtcagtggggtgagtgctctgctcggcggagtcgttgccttgccactaacgcgtttttgttatgcgtggttgcagcagattgttgggccccaaatgttgccgaatatgccaattcatttttcgttcttggcacttttgttaacggttgtcttggttagtctaattgccggtagtggtggtttttggcatgcacgccatcaactaaaagatgggaataagcatctcagtcaccgacggcggatcgttcgtagagttaggacgattgtttcgttaatggtcgtcagtgggttaattattaaactaacgatgcaaagcatggcgttaacctatgtcggtcattccgagaaagcaattggcagtctcggcaattcggttggcaacctgaatctcgtgttgttcttattattaattctaattgcgcttaccggacacacggtattaaaattaattagccacgtgctctattggttaggtgctagaacgctctttttgaacatggcagcccatgatattgactatactgctgaaaaatatttgccgttgtatacgccagtgacggtcattgcggttttaattacggggatgtcggcaattatgtggaatataccggcctatacaaataccacgagtgccaacaatgaacgtttggtgaatttcattttgacaattggtttatatttgggcgcgccgttactgattgtattagcgaatgtattggcgacgctgttagtcgcaaaagaggataatgcccagcaaatgcgccaattacagttgctcggtttaacaaaacagcaactattgctgacacaacaatcgcatgcagtgatcttagttggtgtttgtcttgcagtcagcctactagccgggggcttagtttggagcctgacgattcatgtcgggcgaaccattttgtaccaagcacccatctcaatggcggctttgctcgctggaccgtttttaatggccgttagtatgctttgcctgctaacgatagttaatttagctcgtgtttattgtgggaaatgtttaactaaagcataaaaaagacagctagtgcatttttaagtgcattagctgtcttttttattggttttgattgcggttaagaatgtcctgcgcccacgcgcaccattctaattctgttgcgcagaccattaagcgccgtttcaaaatcaggtaacgacctaagtttttttgcttttcggtgggatcggttatgaggttgtattcttgcatcttatgttggtattgtttttgaattttttggtaatgatggcggcgatcttggagtaagtcagctgcttgttcttgattgaacagtgaaataacgtaaacttttgctaaaaactcgtcacgttgtgtgggtaaattcgtttcttcttgaaaccagtcagtaacgacgagttggccggcttctgttaaatgataaatcttcttttgtttatgaacgggatcaattttaaccgtgacatagccttgttcgtgcagtttatttaatgccgtgtagatttgactgtggtgtgcttcccaaaataaattaatgtactgctttaattcgtagccgctacacggtttgcgaactaacatacataataaaatatagctaagcgtactcatattatttcaccctttaatcgattaattattgctcagtataccatatttagagtcaacaaacatgtcactatattatgtcaaattttaatgtaaaaattgatatgttttgcaatctaatgtagtttatataaagagaaagagagtgatatgttgctggagaatcaaaataaagggctacgctcggcgtatgccgttgcatttacgtgtatggttgcatttatggggattggtttagttgatcccattttaaaaacgattgcggttaaattaaatgccacaccagcgcaaacgaccttactatttacgagttatatgttggtcacagggattattatgctatttacagggtttatttccactagaattggtgcgaaaaaaacgattagtattggtttgatcattattgttttatttgcggcgttagctggtcgttcacagaccattacgcaattaatttcgctacgggccggttggggctttgggaacgccttgttcctatcaaccgctttgactgcgattgtcagtgtgatgcctgaaaaaacggaacaagcgattatgttatacgaaggatctttaggaattgggatggccgttggaccacttgtgggtggcgtcttagggagtctttcatggcgttttccgttttatggtgtcgccattttgatgtttattgcggcgttgaccatcatggtttcattagaaccgattgctaaacctgctaaaagggcgcctttttttgcaggggctgtcgcgttaaaaaatcatcgtttacgttcaatcgggattattgcattattgtataatttcgggtttttcacgattttagcgtatgcaccattcttattagttgggttaactgaattgcaagttggttttgtctttttcgggtggggcgtgatgttagccattgcatcggttttcattgcaccacggatggaacaaaaaacgaatacccttgtgacgttgttgtttgggttaagctttttcttgatctgcttaatggtgatcggtatttatgcagatcaaccagccttagtggcctttggcgtcatcattgctggtttcttccaaggcttggtgaatacgttgttaacgacggttgcgatggaaaatgattcgattgaacgcagtgttgcatcatcggcgtatagctttattcgctttactggcggggcaatcgcaccatttgttgctggtaaaatcgctgagaaatggtcagcgcattggactttttattttgcgagcttaatgattttaattgggattttctttgttctgcgcaatcaaaaatattttgtgatggttgaagaagttgaaaaagaaattgagttaactgagggacaggaattatcataaagacacttaaaaacgccagcgattaatcgctggcgtttttattgattagtcgtacgtaaagccttccccgagtgcttcgtgcacatcaataatggaaacgaatgcgtgcgggtcatgttggttaatcaaccgtttaagataggcgatttcacttggactgacgacacagtacagcattggtcggtcttgatgggcataagcgcctgtggcctgtagaaacgtcacgccgcgttccatatcggccagaatgtcatcggcaattgcttgcgcgtggtcactgattacgagtagccctttggcggcgtaagcaccctcgagtgtgaagttcacaatccgggagaagacgtaagacgcaattaaggtatacatcatatgttcgatatcgaggtaactgagtgagagtgttaagactacgacgtcaaaaagaaggagggagcggcccattggcatccctttttctttttcgataatgcgggcaatgacgtcggtgccaccagttgtgccaccgaagcggtagataatcccactgccgaagccaccacataaaccggctagaatagcggcgattaaaatatcgtggtttaaatcaattgtgatggggacacgttgccaaatccatagaaaaacggacatcatcgccgttccgtaaatcgtgtaggcgagtgcgcgtttaccgaggtaacgatagcctagaataattagcgggatatttaacaaagccgttgaatacgccgggtcgatatgcaaccaataccgtaaaatcaaggtaatcccggttaagccaccttcagccaggtgattttgaatgttgatggtcactagcccaaacgcgtagatcgcacagcccagcgcaatcaccgctaaatcacgactagtcgtttgccaagtatgttgtttcgtcatgtcaacgccccctttacataacttaaatatagcacggaatgggggttaaaaacagttggaaccactttggtggctgaagtggggtccttgattgtggtatgataaatagcatcagaaacagttaattgttagataagagggatagccatgaaagtaaccacctttgcgccggaatttgaagcggccctaccaatcttaaaacaaattgaagcggcgggttttgaagcctatttcgtcggcggcagtgtccgcgattatttattaggcttgccgattcacgacgttgatatcgcaacgtcggcgtatccagcagaagtgaagcaaatttttaaacgaacggtcgataccggaatccagcacgggactgtgatgattcttgatcatgggactggctatgaagtgaccacttttagaacggaaagtggctatcaagattttagacggcctgattcagtgacgtttgtgcggtcgttagccgaagatttacaacggcgggatttcacgattaatgcgcttgcgatgcgcgctgatggtgaaattattgatttattcgatggcctgaccgatctaaaagcgcaacaaatcagagcggtgggcaaagccgacgaacgtttccacgaagatgcactccgtatgatgcgtgccgtccgttttgaaagtcaactcggctttgcagttacaccagaaacacaaactgcgattgccaaacatgctgaactattaacgaaaattgcggtggaacgcattcatgtcgaatttgtgaagttgctacaagggattcagcggcaaaatgggttacaaacctttttaaaaaccgggttgtatcaatattgtccagcgttcgcgactgaagcagcgggactgaccaaattagcggcattaccagcgcaacagattcatgatgaagatacggcttggctactagtcaatgcattattgggtaaaacccccgccgccgccggcaaattattgaaacgctggaagagtgctaacgatgtgatcgatgcggttaaagcaggtttgggattattgccagccattctagaccaatcagccgatcagtgggccctttatcaagcggggcaacatgtattagacatcacgttaattgttgcccaattaatgaccaacgaatcagtcgcagttgatcagtggcaagcaaagtatgcggcactgcaaatcaagcaaaaggcggaactcgccatcaatggacaagtcttaatgcaaaatgggtatcaacctggtccgcaactaggaaaaatgttggcgcaactcgaaaaagccgtggtgttagatcaattaccaaacgatcaagcccaattattgcaatcggctgcacaaaactaagccattccctcagaaggtgtgttaaaataaccatgtaagcacattcggaaagggtgacaattgatgacacaacatgtttttaaggaattgaaattttattttagaaatggtgacgcttggaccgtcagccacaaagaattaaatgatatttggattagccgtgttaccaccagttatggtcgcattaatggtggcccaatgcaagagattcacccttgcaagagtttcaaagccgaaatcttacctgaagcggatcatgtgaagtccgaagacatcaacaccggttctcttgaaatggggatgttcggtcgtgcaacgaagtatcaagacatcgaaaaactcgatttaatctttgaagatgatcaagatcgcgcaccaatgcaaatttatttcccattcaagaataaagataatagtggcttagataatatttatcaaagtagccaaatctcacaaaaaaatggtcggttgtacattgtgattgatgcagaacacacaattgcagatatgtaccctgaaatttaaacgttagctcctgacaatattgatcgttgtcaggggcttttttatttgtttacagtttacgacattctttttgtcattttgattgtcagtcgtctgattattcgctatgattgatggtaacgaaagtaaaaaggtgactatattgcaaacattgacagcaacgcatttaacgaagacttacggcgaaaaaacgctttttgaagacatttcatttttaatccgtgaaggggaccgcattggtttagtcggcattaatgggaccgggaaaacgacgttactcaacgcgattaccggcatggattcatacgatagcgggcaggttgaaacgcctaaccaatacgcgatgagttatttagcccagaaaccaagctttgatacgaacttaagtattatggcggcgatttttgccggcgataatccggttttcaagacgattcaaaactatgaacgcgtcttggcggcatatacgcaagatcccactaatccgaagttacagacgcaatacgaacaagctgatgcgcaaatgacgcaacaagatgcttggacggttgatacggatatcaagacgattttgacgcaattacatctaacggatttggatcaaccgattaatacattatctgggggccaacaaaaacgggttgggttggcacaagccttaattgaaagcccagacttattgattttggacgaaccaacgaaccacttggattttgattccattgaatggcttgaaaaacgcttagcacaatatcaaggcgcgcttttaattgtcacgcatgatcgctacttcttggatcgtgttgcgaaccaaatttttgaactcgacggtggtcaactctattcatataacggtaactatgaacaatttttaacccaaaaagctgatcgcttggaacgtgaacaacaagctgcccataagcaacaacaactctacaagcaagaattaacgtggatgcgcgcgggtgctaaggcacgaacaaccaagcaacaagcgcggattaatcgcttcaatgacttaaaggcgaatttaaccactggaccagacgattcggaagtcgatattcagatggggcaatcgcggttaggtaaaaaagtactcgaattaaagaacgccagtttaaaactcggcgatcgtcagattttggatgactttagtattctagttcaagcgaatgatcggattgggattagtggcgtcaacggggccggtaaatcatcactgttaaacgtgttggctgaacgcctcccacttgatagtggcgagttaattgtcggcgaaaccgtcaacctcggctactatacgcaacaaaatgaagacttagatcctaacaaacgagtgattgcatacttgcaagaagccggcgaagaagtcattggtaaaaatggggaccggatcagtgtcacacaattgttagaacaattcctattcagccgtcaaatgcacggcacattgattggcaaactttctggtggtgaaaaacgccgcttgtacttgttgaaaattttgatgcaacaaccaaacgtcttattactggatgaaccaactaacgatttagatattggcacgttgacgattctggaaaattacttggaaaactttaacgggactgtgatcacagtttcgcatgaccgttacttcctcgatcaagttgccgacaaactcttgatttttgaaggggccggcaagattagcaccgaagttggcctgttcagcgattacttggcaaaacaaaaagcaacaccaactaagtcagcgcctaaagcagcgacagcatcggttgaagaagcaccagttgcaaagaccaagcagaaattaacatacgccgaacaaaaggaatacgaacacatcgaagccgacatggaacaattggacgaacagattgaaaccatcaaagcagaaatgaacgcaaacggcgcggactatggtaaattagcagagtggcaggcccaaatggatcaacttaaccaacaactagacgaaaaaatgacccgctgggaatacttaagtgaatacgcaaactaaatgagtgcgttcaaaccgggtatattccgagcactagcctaacaaggcgaatgattgctgaaagcaatcgtttgacttgtgtagctaaacgcaagaacatggttttaaaagcacgttaaaaaactgagtgcgtttgaaacggtttgacgctgagcattaacttaatttggcgaattagcgatgtaatcgctgatttgacaaatgtcgttaagcgcaagcgccagtttcaaaaagcacgttaaaagaagtgcgttcaagcttgttcaacttttaagcattagcttagtgtgacgaataagcgacaaagtcgattatttggcatacgtcgctaagtgcagaaagttagcttgaaaagcacgttaaagaaaggaatccacatcatgtctgagcaaacctacttagatttagcacgtaccattttagaaacgggtcactataaagaagatcgtaccaacactggcacctatagtctgtttggctatcaaatgcgctttgatttaaacgaagggtttcctttattaaccaccaaaaaagtgccattcgggttaattaaaagtgagttattgtggtttttaaaaggtgattccaatattcgttacttactacaacacaataatcatatttgggatgaatgggcgtttgaacgttacgttcaaagtgccgattacacaggcccggatatgacagattttggtcatcgtgcccaaactgatgcggccttcaatactgtttatcgcgaccaaatgcaacagtttaacgaacggattttagacgatgaagcctttgccaaacaatatggtgaactgggcgatatctatggtaaacaatggcgtgcttggcaaacccgttctggggacacaatcgatcagattaaaaatgtgattgaacaaattaaaaccaatcccgattcacggcgcttaattgtctcagcttggaatccagaagacgtgccaagtatggcgttgccgccttgtcatacgatgttccagttctacgttaatgacggacggttatcgtgccaattgtatcaacgtagcggggatgttttccttggcgtaccatttaacattgcgagctacgcattattgacacatttgattgcgcatgaaaccggccttgaagtcggtgaattcatccatacgttgggtgatgcccatatttacagtaatcatattgaacaggtgaagacacagcttgaacgcccaattcatgccgcaccaaaattgtggctcaatccagataaaacaagcatctttgattttgatgtcgccgatattaaacttgaaaactatgaagcagaacccgcaattaaagcacccgttgcggtttaatgaggaggagcgccaatgttagcattcttatgggctgaagatcaaaatgggttaatcggtcaaaatggtcacttaccatggtcattacccaacgatcttgccaattttaaacacgaaacggttcatgaagtggtggtaatgggccggaaaacgtatgatagtttacccgtccaacccttacctggacgccaaaacattgtgattacgcgacaaccggatttagctgtggctgatggggtgtttgtgatgcacaccaaagcggaactgcttaaatatgagcaagccaacccgatgaaaaagatttttatcattggtggtgccgatatttttgcaatgtacgccgatgatgtcgattatctgtacgttacaaaaattgctgaatcgtttgaaggcaacgtttatatgccaaaattagcgatggatcagttcgaattgatcagtcaaacacctggtgtggtggacgaacgtaatcgctatgcgcatacgtttgaaatctatcaacgccgttagaaagattcaattaagggcggtcgcagcgatgtaaccgcctttttgcttgctacaaaagtgacaactggctttttttttaatcagtaacttttggtgaaaaaagcgtgattgtttgatatactgtcaatagacataatcatagaaatcacggggccgttgattgcccagatttcaagatagaaagcgtggctgaagtaatagtggctaatattaaaattgtaacggattcatccatccaactcactcctgaagaaattaaagaacatcatattacggttattccgttgacgattatgattgacaatacggtgtatatcgatggtgaaaccattacccgcgatcaatttatgactgaaatggcaagtgcgagtgccttacctaagacgagtcaacccgcaatcgggaattttgtcgaaacgtatgaacaattagcggctgatggcagccagattttatcaattcacatgctacgagcaattagtggcactgttgatacagcccgccaagccggcgagatggcgaaagcagatgtaacagttgtcgatagcgactttaccgaccgtgcaatggcattccaagtgttaaaagcggcagaagtcattgaaaacggcggtagcatggatgatgctttagcagccattcaaaacgtacacgatcatacgaagttatacatgggtgtgactgatctaaccaacctcgttaaggggggccggttgagtcatgcggctggtgtgatttcaagtttattaaatatcaaggtgatccttgaagtggctgatagcgaattaaaagtgttacgcaaaggccgggggatgaagaccattacgaaattcatcgatgaaatggaagctgatatgcgcgacttaaagattcgggcaatcgggatttcacatgcggatgggctagaattgagcgaaaaaattaaagcacaattgcaagtagtattcccaaacatcgaaattcttgtccggacaactgatccagtgattgcaacgcatgcgggtgcaggcgcatttgccgttatgtactacacagaggattaacaagattacaattaatgcattaacacactaaggctggttgacatttaattgtcccagccttaactattatctagaaataaccgaggtgtcacgtttgaagaaagcacgacagattttaattgatttaggcttatttgctggtgcgattttagtggtctttattatctggcaactattaacgccacggcccaaccaagcgcctaagacggtaacatcaacgtcttcagcggataaagtgatcaaatcaaaaccaaaaccaaaaaagacgttgcagttggttgcgattggcgattcattgacgcatggtgttggtgatgagaccaacaaagaaggctatgtgtcattagttgccaatcagattcagcaagcaaccaagcatcccgtcaagaccgccaatttcggtgtgacgggcgataccagtgtacagattactaaacgcgtgcagaaacaaaagccgctacagcagcaattggcaaaagctgatattgtgacgctaactgttgggggcaacgacctaatggcagttttacagaataatttttttgagctgaatcaacgtcggattacgactggtcagcaaaaatatcaagcgaatttaaccacgctgatgatgcaaattagaaaatataatcctgatgccccaattttcatcatgggggtctacaatccgttttatgtctatttccctgaaatcactgggatgtcaaaggcggttgctgagtggaatcagaccgccaaaacggttgctaatgatttcaaagatacgtattatgtcaatagtgatcggatgttgacacggggcgatgggcattttgtcaaacagactaaatcgctcgctaaaatggatagtgcacagttgcaaaaaacattagcggctaacgagcatttgaacccctatatcagtccagatgatcatttccatcccaatcataaaggttatcaatgggtcacaaaggccttttggcaagtgatgaaagcacacaagcaaacgtgggattagagaaaggataggttatgacaaccagacaagcacatcaagcagcacagaaaacaacaactaaacggaccatcaattattggaaatacagtttcatcgtcttattagcagtcgtgatcgggacagttggtcttgtcggctacaacgtgacagcccctaagactgaaatgattaaaactgagaaaatcatcaaagctgatagcacttttgaaattcagatgcataagagacaaatcaatagtttagtcacctattatttacaaaactacttggaagattcaaagattaaataccaactcaccctggatcagcaggcgattttatctggtcaattcaagttcttagggtttccggtcgaattcaacctcttttttgaaccgtacgttttagaaaatggcgacgtccaattacgcgccaaacaattagcagtcggacaattgaaggtgcccatgtcgtttgtctttaattacatcaagcgtcaatacaaattccccaaatgggttattttggatgcacacaagagccggattacattacgcctaaatgagttcaagctcgaaaacgggatgcaagtaactgctaaacatatcgatttgaagaatgataagattgatttaaacgtctatatcccgctaaaaaataagaaataaggtgttcagatgaagcagagtttttatcgttacctcatgacccaacgtgatccgaataattatgaaccagttccccaatttgccaacaatgccttttttgaccaatctttccctaaacaaagcggcgattatgaaacattaacgcgctatttggaacttaatggcagctacctcccgagtatgacgatttttgatgaggcgtatgaagcctatcaggaaagcgaacaagcctaatgacttccccgaagcagaaattgtggcggggatgggccattaccggctattggcttctcgcatttttactggctgggacggtagcgattgtgttacggtcgttcattctggtccccgcatcggtgtcagggcaatcgatggccccgacgcttgagtcagcggaccaactcttattacgcactagtgggcccatcaagcgctttgatgttgttgtcttcacccgagctgatcaaacaacttatgtgaaacgggtgattggtctgccaggtgaaaccgttgcataccgcaatgaccagctgtacatcaatggacggcatgtcgacgaaccattcttgaatcaggccaaaaagaaaccagggattttaacatcagattttgaattaaaaaccttaatcggcgaaaagcagattccaaaagatgagtactttgtattgggtgacaatcgccagatcagcaaagatagccgtttgtttggtacgatccaccgcgatacaatattaggccgagcagtggcggtctactggccgattaaagatatacaatctttaaaataataattaaaagctgacatactctagagtgtgtcagcttttttgattatcgagtgctaatgatcgtatgaaatgtactgaatatgatgcttaactgaaaaaatgatacgcttaattggtggatgttgtagtccggaattaaatttaacccgtcagccagacatcaggtatgatagaattaagaataatacaatcagtgacaaatattaagaatgatgtatatcgcttaactagcaataaaggagttattatgacaattcaatggtatccaggccatatggcaaaggcccaaaaacaaattaaagaacggctcaaagcagtcgatttgattctcgaaattgtggatgcacgggttccagaatcttccattaatccgatgattgcagaacttggtcaaaacaaaccgacgctcttgattatgaacaaagcggatatggcagatgccaaacgcacacaacaatggattgaaacatttaaaaaacgggggattacagcaatcgcgcttgatgcgcaacataaatcaaaattaccgcaaatcgaaaaagtagcacaagaaattttggcagacaaacttgctaaaaaacgggcaaaagggattcttaatccggtgatccgtgcaatgtgtgttggggttcctaacgttggtaaatcaacgattttgaatcgcttggtgcaaaaaaacattgcggtaacaggtaatcgacccggtgtaaccaagaatcaacaatggttaaaagcgggccaatcactcgaattgttagatacaccaggggttttatggcctaaattcgaagatccagctgtcggcaataagttggccttaactggttcgatttcggatgcaatttatcacccggatgatgttgtggtgtatgccctcgattatttcaaggatttctatccgcaacaattggtaaaagaataccatgtgacgccggctgaacttgaaatgccagcgcctgatttaatcatggcattgaccaaacgactaggttttaaagaagactacgatcgcttctgtatgaaattcatcacggacgcgcgtaagggtaagttagggcgctttacactcgatatcgttcctgtggaggcgcactaatgaccaaaccagaatcaattgctgccattaaggcacgcttattagacgacatttcagaggaagaagtggcgctcttacgcagtgatgcgcgtgctggcgtgcagaagttactcgttcaatatgacaagcggatggctaagttagcggcgcaaaaagcggcgtttatcgaacgacgccagctagaagaaagtttatggccagattatcccttgattgctggaattgatgaagttgggcgcggcccattagcgggtccagttgtgacagcggccgtcattttgccacatgattttgacctatggcaagtcaacgactctaaacagctttcgtttaaggtgaaacaagaactgtatcgcggtatcatggcacaagccatcagtgtcagcattgggattgccgatgcaccacggatcgaccaagagaatatctatcacgctacggaactggcgatgggcgaagctgtcgctagtttagcagaacaccccgattacctattggtggacgcaatgaccgtgccgacagacatcccacaagaaaaattgattaagggggatgcgcgcagtattagtatcgcctcagccagtattgtggctaaagtgattcgggatcaattgatgattaattatgatcaacagtatccgggttacgatcttgctaataatatgggttacgggacagcgaaacatctcgctggtttagctgaattcggtgttacgccaattcaccgccgcagtttttcgcccgttaaagacgccctatagaaaataaaacagctcctttacgaagataaacgtaaaggagctgtttttttgtgttgactaaaaagcaattattattgaaagtacacctggcagatgggtttggccccatcagtgaattacgcttagccgcatggttagtaacgagtcacaattgggctttatcggcattggagattgcgcagattgcgtgtttaccggagcgatattggctgacctttcagactagttttgacagtctagctctgcaacagaagtgtgccacgcatgaacgttatgttcagtatctgacgattctagaagcagattatccgcaacggttgttagaaacccattgtccgccaacagttttattttatcgcggcgatttaagtgttttgaaacagccatgtgttgcggtggttggtgcgcggcaagccacggagtatactaagcaagccctgcagcatttattgggattaccacaaacaacgacgattatcagtggtttagctcaaggggcggatgcgatggcgcatgaagttgcactccaaaaagggttacgaccgattggcgtgattggaacgggcttgaattgttattacccaccacaaaacgaacacttgcaacaggcggtcgctgaaaaagggttattgatatcagaatacggtttggacgtaacggctaagaagcaccacttcccagcccgaaatcggattattgccggactttgtcatagtttagtggtcacagaagcccgccaaaaaagtggtagcttaatcaccgctaatttagcattacaagccaatcgtaacgtatatgccttaccgggccaggttaatcattcattatcggcaggctgtaatcaactgattttagccggtgcaacaccgcttttaaatcaacaattgttattggacgagttgcattattttgattgagggttaattgttgacaattctgcggcatgttgttaatattaaagtcacaagttacttataaagtaacaaatggaattcaaaggggatttttaatatgaaatatgcaattacagcagtgacaggtcgttttgggcaagtcgcaatgaagacgttggctgacttagtgccagcagaacaaatcattggattagcacggaatactgaaaaagccactaaaatggtcccagctggtgtgaccgttcgtcccggtgactataacgatgttgccacattaacggaatcactcaaaggcgttgaccggttattattcatctcctcacaacctggtggcgatgtgccccgtgcgcaacaacatttaaacgtgattgaagctgctaaaaaggctggcgttaagtggattgcttatacgagtttcccacacgctgatcaagcaacaggtgctttagcaagtgatcacattcaaactgaaaaagcattggcagcatcaggcattgatcatacattcttacgcaataactggtatcttgaaaacgaaatggatagcattaaaggcgcattagcaggtcaaccatttgtttatggcgctggtgaagggcatgttggttgggcactcgaacacgactatgctgaagctgcggctaaggtattagtcaacgatcaaccaaaagcgatttatgaattttccggtgcgccagccacttatgcggatttagctcaagcgattagcgagttgactaatcaagaatttaaggtagtatcattagatgcggctgattatcgtcaaagcctcgaagacaacggcttacctgctgaagtcgctgaaattgtcactggtattcaaacaatgattcaagatggtgatttagatgaaaccacttctgatttacccgatgtcttaggccgaccattaccttcattaaaagaagcgttacagacgattattaaataagcctgaattgatttcaaaaaggcggttgaaccatgaaatattctcataaacttagtgatgccatccatattttggcctatgtcgatatttttcaagatggtgatttatcaagccaagcgattgctgggagcatcgagtctaatcctagtttagtgcggcggctaatgtcactactggtgaaggcggatttattagcgactaaaccggggacgattgcccctaaattagcgcgcccagcggaacagattacaatgttagccgtttttcaggcgcttgatacagatcaacggttattacacgttgatgaaaaaacaaatccagattgtttaattggtagcaacattcaagcaacccttgatgcggcttatgatcaggtgcaaaaagctgcggaagcggagatggcaaccatcacccttgatcaaattattgcggggattcttgaacgcgatgcacaaaaaaatagtttgtcagtctaagttttttatctggcgactatataatagaagaaatcggggttcgaccaagtggttgaaccccgatttttggtgtgatttgtacgtttgaaaacaatttctctttggcatactgccaaacctatgctatgctttaagctgttaatatcaagcatactatcagttgacaatcgtcaaggtagtgttttatgctaatgaacgatttgaacaaagcgttctgttgaaaggggtttgtccatggcaggcaaaaatttagtcattgtagaatcacctgcaaaggccaaaacaattgaaaagtaccttgggcgcaactataaggttgttgcaagcaagggtcacatccgcgatttaccaaagagtcaaatgggtgttgattttgaaaataattatgaacctaaatatatctcgattcgcggtaaaggcgaaacgattaaagaattaaaaaagcaagctaaaaaagttgatcatatctatctcgcagccgatccggatcgcgaaggcgaagcgattgcatggcatgtttcccatattttaaaactcgatccaactgaaaaaaaccgggttgtctttaacgaaattaccaaagacaccgttaaaagtgcttttaaaaatccacgtagtatcgatatgaaactcgttgatgcacaacaagcgcgacgcgtgcttgatcggattgtcgggtattcaatcagtccattactctggcaaaaggttaaaaaaggcttgagtgctggtcgggttcaatccgttgcgttaaaactcgtgattgatcgtgaaaacgagattaaagcctttgttccagaagaatactggtcattggatgcggaatttaaaaagagtcgcagtaagtttaacgccagtttctacggcgtgaagggtaagaaattaccccttggcgataatgatgcggttcaagcgattttgaaacaaatcgataagactaaggatttcacgattgaagatgttaagaaacgggaacgcaaacgttttgcagccgcaccatttacaacgagttccttgcaacaagaagccaaccgtaagttgaacttcagaacgcggaaaacaatgatgcaagcccaacaattgtatgaagggattaaccttggtggcaaagaaggcacggtcgggttaatcacttatatgcgtaccgattcaacccggatttctaccggtgctaaacatgaagcgtcacaattcatccatgacaattatggtgaagaatatgcggcattaaaggcgcataagacgaagaatcctgaaggtgcacaagatgcccatgaagcgattcgcccaacgtcagtgatgcggacacctaagagcttgaaagacgttttaactaacgatcaatataaaatctataacttaatctggtcacggtttgtcgccagtcagatgacaccagccatttttgatacggtcgcagttaagattgctcaaggtgatgtcttattcaaggcaaacggctcacaaatgaagttcccaggattcacgaaactctatgtgtcatcacgtgatactgaagactctgctaaggataatgtcttaccagaacttgcagttggggatgcggtgaaactcgttaaaactgatccagcgcaacattttacgcagccaccagcacgttattctgaagccaatttagttaaggctttggaagaaaacggtgttggtcgaccatcaacgtattcaccaacgatcgaaacgattcaacggcgttattacgtgaagttaaacgcaaaacgctttgaaccaactgagttaggggaaatcgtcaatggtttaattgtcgaattcttcccggacatcgttaacatcgactttacggccgatttggaacatcgtttggatgaagtcgaaacgggtaaagaagactgggtcaaggtgattgacaacttcttcaaaccgtttgaaaaagaagtcgaaaaagcgagtgaacaaatcgaaaaagtacaaattaaagatgaaccagctggctttgactgcgacatctgtggtgccccaatggttgttaaaatgggtcgttatggtaaattcttcgcttgcagtcgcttcccagattgtcgcaataccaaggcaatcgtgaaggaaatcggcgtcacctgtcccaaatgtggtaaggggcaagtcatcgaacgtaaatcgaagaagaatcgcttattttacggttgtgatcgttacccagattgtgattttgtcacatgggataaacccgtcggcagaaactgtccgaagtgtgaacactaccttgttgaaaagaaaattaaaggtggcaaacaagtaatttgtccaaacggtgactacgaagaaaccgtccaaaaataattagaaaaatggagactagcaaatgagcacagaaccttttgtaaacgtgattggtgccggattagccggttcagaagcagcatggcaaattgcccaacgcggtgtgaatgtgcacctctatgaaatgcgtcccgttaaaatgacaccggcgcaccatacagaacaattcgcagaattagtgtgtacgaattcgctccgtgcgaaccaaattaccaatgcggttggcttaattaaagaagaaatgcgtcacttggactcattaatcatcagtgcggctgatcaaaatgccgttcctgctggtggcgcattggccgttgaccgcacaccgttttcacaaacggtgacggatcgcttagccaatcatgaacgtgtcacagttcatcatgaagaattaaccgattttccagaaggtcctacgattgtggccactggtccattaacgtccgaaggcttagctgaaaaaatcagtgccttaaacggcagtgatggcttgtatttctacgatgctgcagcgcccattttggataagaacagtatcgatttcgataaagtttacctcaaatcacggtatgataagggcgaagctgcttacttaaactgtccaatgactgaagaagaattcgaaaacttctacaaagccttgattagcgctgaagttgcagaaatgcatgactttgaagaagaaaagttctttgatggctgtatgccaatcgaagtgatggccaaacgcgggattaagacgatgttattcgggcctttgaaacccgttggattggaagatccgaatactggcaaacaaccatacgccgttgtgcaattgcgccaagacaatgcggctgctagtttgtacaacattgttggtttccaaacacatttgaagtggggcgaacaaaaacgggttttccgcatgattcctggtttggaaaatgctgaatttgtgcggtatggtgtgatgcatcgcaatactttcatgaaatcaccagatgttttattaccaacctatcaatcaaaacaacgtgacgatctattcttcgctggtcaaatgactggggttgaaggctacgttgaaagtgccgcttctggactagtggctgggattaacgccgctaaactggcgttggaccaaacaccggctgttttcccaacggatacggcgatgggatcaatggcgcactatattacccatacgagtgccaaacatttccaaccgatgaatgcgaactttgggattttcgaacctttgaaacaacggattcgcgataaaaaggaacggaaccaagcacttgctgatcgcgcacttgaaagtatcgaccaatttaagacgacactttaattagaatcttttaaatcccgccaggcttgtggtaaagtaatactaatcaagcttggagggatttttttggcgttagaacaagaatggcttaatctttttttacagtacttagtggtcgatcggcattactcgccagaaacccaaaaagcttatcaagctgatattcagatgttcagtgcttttttaaccgctaacggcggcttagcgtcgtttaaacaggtcacgccactggacgtgcagacttacttgaatgaaatggatcaaaaagaatatagtcgtgaaactgtcgcgcggcgaatttcgagtttgcggtcgttttaccggtatttagtgaaaaatgagttcgtgcaaaccgatccttttgaagctgttcaattaaaaaagcaacagcataagctgccgcggtttttttacgaaaaggaaatggacgcgctatttgctgccattgatggggatcaaccactcgatcaacggaatcgcgccatcttagaattactgtatgcgacggggatgcgggtgagtgagtgcgcgcagttgacggtagcacaaattgatttcggcttacgcgtcattcttgttcatggaaagggcaataaagatcgctatgtaccattcgggcaccatgctgaacgtgccttgcaagcttatttaaaagttggtcgtgttcaattgatggccaaaaaacaattggaccacgatgtcgtttttgttaatcatctcggagcgccaattacaagtcggggaattgaatacattttagatcagattatcaagaaaacaagtttaacgagtgacattcatccgcatatgattcggcatacctttgcaactcacttattggatcacggtgctgatctgcgaacggtgcaggaattattaggccacagtagtttatcaaccacacagatttacacccatgtcaccacagcccatttacaaaaagattaccgccaattctttccccgcgcgtaaaactcggactaaagtttgatttttttcaacgaaaaatagactaatattagcacacagtcttaaagactgctaaaatagaagtgcgttcaaaccggttatgttctgagaattagcctaacaaggcgaatgattactggaagcaattgtttgacttgtgtagctaaacgcaagaacatggtttgaaaagaacgttaagaaagaagtgcgtcatcaacgggttgtttttgagcatttgcctaatcaggcggattaccggcaacgccggtgatatgacagatgtagcaaagcgtagaaagcagttgatgaaagcacgttaagaaaaaagtaagtgctttcaagcttgttcaacttttgagcactagcacagggaagcgaattagcgataaagtcgctgatttgattcacagcgctaagcgcagaaagttagtttgaaaagcacgttaagccccgcccaatccccaaacaacgttaggagtaattcatatgacaacaatttgtgcagttaaacataatggtaaaacagctatcgccggtgacggtcaagtcaccatgggcgaaaaatttgtgacgaaggattctgctaaaaaggtccgtcgaatttatggtaatcaagtcgcaatcggctttgctggtggtgttgcagatgcctttacgctacaagaatggtttgaacaaaaattagaaaagtattcaggcgacctgcaacatgctgctgttgctttagcgcaagactggcgtaaagatccaacgcttcaaaaattagaagcgatgttgattgcggtcaatgcgactgatattttattaatttcagggaatggtgaagtcatcacccctgatacgctatcggaatcaggtgatcaagtgattgccgtgggttcaggcggcaatttcgcccaagcagcagctaccgcattattacttgaaggaaaagatgacttatccgttgaaaaaatcgtcacaaccagtgttgatattgctggtggaatcgatgtttacaccaaccacaacgtgattgtcgaatcattttaggaggtcgcacaatggacttaatgaataaaacacccaaaacaatcgttgccgaacttgatcaatttgtcattggccaagatcaagctaaaaaagccgttgcggttgcactatacaaccgttatcgccggatgcaactcagtgcaaaaatgcaacaagaaatcacgcctaaaaatctattaatgatcgggccaactggggtcgggaaaacagaaattgcccgacggttagcgaaagttgtcgatgccccatttatcaaggttgaagccactaaatttaccgaagtggggtatgtgggacgtgacgttgaatcaatggtccgcgacttagctgatgtggctgtgcatatggaagaaacagaacaatttaaaaacgttcgtgctaaggctgctcgtcaagcagacaagcgcttggttaaactactagtaccgggcattaaaaaggaacaacgtaagaacaataacaacatgaatgatttaatgaacatgtttaacgcgcttcaaaaaggggaaacaccagctggtttcggacaaactgaaccagaagaagtgacggatgatatccgtaacgaacggttatctgttaaagaacagttagataaaggcttgttagatgaccgggaaatcgaaattcaagttgatgaaccgaaaaaagttgccccaatgaacgatatgatgggccagatgggaattgatttaaacgatactctgggttcaattatgccgaagaaaaaaattacgcggacggtaacggttaaagaagtgcgtgaagttttcattcaagaagaatccgctaaattagtcaaccatgccgatatttaccatgatgcgctccaacgtgttgaaaataccgggattatttttatcgatgaaattgataaaattacggctggtggcaaaaaacaatctggtgaagtctctcgtgaaggggttcaacgtgatattttaccaatcgttgaaggctcacaagtcaatacgaaatacggtgttttgaagaccgaccatatcttatttatcggttcaggggcgtttgctgaatcaaaacccagcgatttaatcgctgaattacaaggacggttcccaatccgggttgaacttgaagatttaactgaaaaagacttcatccgaattttaacggaaccaaacaacgcacttgtaaaacaatacatggcgttgattggcgccgatggggtgcacgtcaccttcacgatggaagcaatcggccgcattgctgcgattgccttccaagttaaccatgataccgataatattggtgcgcgtcgtttggccaccatcttagagaagctattagaggatattctctttgaaggtcctgacatgcagatgggggatatcaccatcacagaacaatatgtcaacgataagatcggtaatattgcagccgataaagatttaacccgctttattctataatttttaaaaggtggtattttaagatgatccaaattgcaaacgaatttttaacggtgaccctcagtccaaaaggcgccgaattacaaagtattaagggcgccgtttcggggcttgaatatttatggcaagctgatcccgatgtttggggccggcacgcacccgttttattcccattcgtggggcgttcaaaagcggaccaatatacgtataatggccaaacctatccgatgggtcaacacggttttgcacgtgatcgcgaattcagtatcgaagaacaatcggaccacgccgtgactttcttgttgaaagcagacgctgacagccgggccgtgtatccatttgaatttgaattacgtgtgagctatcgtgttcatgatatgcatttgacggttggctatgacgtccgcaatgttgcgccaagcgggccaatgtacttctcaattgggggtcatccaggatttaaagtcccattaacggatgacacgcaatttgaagattatttcttagactaccgcccacaaaaatcacgggttaagatcccattgcaaggggccttcattaatttgaacgaccggacgttagcaccaaccgacgtcgcaacggatatcaatcaccaattatttaaaaatgacgccttaatctacgaattaaagggtcaagccaatgaattcagtattcgttctgaaaaaacggaccactcagtgaccatgaaattggctggcgccccattcatcggtgtttggtcaccttatccaacagaaggcaaccttgtgtgccttgaaccttggtgggggattgcggataccgttgacgcaagcggtgaattttcagaaaaatttggtgtcaacgaactggctgcaggtgaaacgtttaatgcaagttatgaaattactgttcgttaatgaatgattaaaaaaacgcacttaccaagatggtgagtgcgtttttttagtaaactggctgtaggcgggtaacgcgttctaaacgcactctgctagtttttccagtagttccatgctaagatataagttataaaatcataggttaggtagggtaagtcatgactgaagaaaagaagtattacggcgcggatgccatcatcgatagtttagtaaatcatgatgttgagtacgtgttcgggattccgggtgcgaagattgatcgggtttttgaacgactagaacatcccgttaatccaaagacgcccaaattaattttgacgcgccatgaacaaaatgcagccttcatggcggctgggattggtcggattacgggcaaaccaggcgttgtaatggcgacttcaggccctggtgccagtaatttagcgacgggggtcgtgacagcaacggcagaaggtgatccagtcttagccattgccggtcaagtgaaacgcgctgatttgttgcgactaacgcatcaaagcatgcgtaatgccgctttattcgcaccaatcacaaaattcagtgcggaagtccaagaacctgagaatttatcagaagtgattgctaacgcctatcaagaagctgaatccgctaaacagggcgcaacgtttgtcagcatcccacaagatgtcacggactcagaagttcattctaaagtgattaaaccgctaatggcgcctaaattagggccagccagtcccgttgaaacgacgcttttggcacaacggattaaagaagcaaaattaccagtacttttagttggtatgcgcgcttcttcaccagaagtgacagcagcgattcgcaatttagtggctgaaacccacattccggtcgttgaaacgttccaagcagccggtgtcatttcgcgtgatttagagactgatttttatgggcgagttggtttattccggaatcaaccaggcgaccgcattctaaaacgcagtgatcttgttattgcagtcggctatgatccaatcgaatatgaaccgcgtaactggaacgctgaaagtgatgcgcacattatggtgattgatgatatgcgcgctgaaatcgatcataatttccaacctgaaaaagaattggtcggcgatattgcgcagaccctagactttttattaccttatatgaaggggtatcaactagcgggcgatgtgcgtgattatttagttgaattgcacgcagaactcaatcaacgtgacacggcacctgaaatgacgaccaataatccacttagtcatccgttgaacattatttcagaactgcaagcacgggtcaccgacgaaatgaccgtcacggtcgatgttggtagtcattacatctggatggcgcggcattttagaagttacgaaccacggcacttgctctttagtaacgggatgcagaccttaggtgtggcattgccatgggcgatcagtgctgctctagtgcggccaaatacacaaattgtgtcggtttcgggagatggtggcttcttattctcaggtcaagacttagaaactgcggtgcgtctgaacttaaacatcgtgcatattatttggaatgacggttattatgacatggtaaaattccaagaagaaatgaaatatggcgaatcagcggccgttaagtttggtcccgttgattttgtccaatatgcagagagttttggtgcaaccgggttacgggtcgaaaaagccgcagatcttggtaaagtattggatcaagcctttgccattgatggtcccgtccttgtagatgtgcccgttgattacaaagataatcaattattaggccaagcattattacctgaccaactcgtttaatttgaggaggaaaatcaatgacaaatgatgtcaaacgcgtttatcaacacggaacgttagccctattaattccgggactctttacagggacaatgaccgttgctgaattattaacccatgggaattttggaatcgggacggcgcacggtttagctggcgaactggtcttattagatggccatgcttatactgtgaatggggatggccaagtgactgaactcgcacctgatgcgacagttccatttgcgacagtgcattggcaagattcatcattacctacacaagcggttcatcaacgcacaaaggctgagttagaaacgcaaattctagcgcaagcaccgttaaaaaacttgttttttgcggttaaaatgactgggactttcaaagtcatgcatacgcgggccgtccaaacacaacaggagccttatccgaatttgactgctgcaacccgagtgcaaccggagtttgaacaaacagacgtaacgggcacgttgattgggtattatgcaccagcgctttatcaaggcgcagctgttgcaggctatcacgtacacttcttaaacgatacgcacgactttggcggtcatattctagactataccgtggtcgatgctcaaatgacgctccaaccgtttgaaacgtttgaacagcacttcccaagtgataacgaagcttttttaaagagtgactttgacttacaacaagtcaatgccgatattgaagaagcagaacactaaacattcaaaaagcccacggaaaaatccatgggcttttttgtattttaagcatggtggttaattggaccgtacttgtggccgacttcaatcgggttagcgatggcgcggtgaacaaattgtttagcggtcttaatggcagcctcaattgtctgccccttagcgatttcagcacagatgcaagctgaaagtgaatcgcccgtcccattaatatgggtagtttcaacgtaaggttctgatagccaaaattcttgtccatcggcaaggcaaacgtagtctgtaacgattgattgtccggcctcgtgatggcctttaatcatgacgttttttgcgtccattgccaatagtgcttggccagcagcttggaaatcagcaggtgtcttcagttcaataccagttaatttttgcgcttcgtagaaattaggcgttaggacagttgcaaggggcattaattctgtctttagtgtgttaaaagcatcatctgccaacaacaatgcttcatgcttggtaataatgaccggatctaacactaggggaccaaagtcatgttttttcaactgattagcaacggttagaatggtctcacggtcggttaacattcctgttttgcaagcgcgaacctgaaagtcggctgcaattgcttcaaactcggcatcaataaagtcgggagacagtgcttggctagcacgaatcccatatgaatttccagcaacacaggctgtcaaaatgctcataccataaacattacgggcaaaaaaagtatttaaatctgcttgcgcaccggcactgccatcagaatcggaaccggcaattgtcatgacttgcggaaagctatttaacattatcaacatctcttttccagagcggacggaacgtccatcacttaatatatcctaatattagtataagcttttaggtgtccttttttcaatcagcagaagacactaattaagtgaatttcgtgtatactatgaattaaataattatcaggagggacttatgattcaattaaaaatcgaacgattatcttatcaggttgatcaacaagtgattttaaccgacattaatttaaccgttgaaaaaggcagttacttaacgattacaggaccttctgggggtggtaagagtaccttgttacggttaattgcggacttactaacgccgacacgtggcaccattttattaaatgatcagccactgacccagtttagtcccaatcagtatcgacaaaaggtttcgtattgttttcaacaagcaacgttatttggtgaaacaatcggggataatttacgttttccatacgagattcgtaatttaccggtcgatatggcagcaattgaaaaagcgttggcagcggttgggttagccaacatgccactaacgaaaaaaattaccacgttatcgggcggtgaaaagcaacgaattgccttgattcgtaatgttttatttccaccggaagttttattacttgatgaaattacgactggtttagatgccgctaataaggcaattgtattggcgtttgtccagcacctcaatgaggattgcgggctcacaattattgccattacccacgatacagaagaattacaacggaaagggcgccaggtgcaaattgttgctggcgaattggtaaatcaagatgaacttagccgttaatggtctttcactgacgtttgctgtgacattagtgtttgtcgcattagtcattagcttccatgaaaaaatcggtcttgaaaaagatatgattatcagtgtttttcgcgcaatcattcaattatttatcgttggttatttactgaaattcatttttcatattaacgatgtgtggctaacgttattgatgatgctgatcattatttttaacgccgcagcaaatgccaaaaagcgggcggggaaactacgcaacgggtttccaatttcatttatcgcaattttaacaagtactggggtcacgttaggattacttgttttatctggggcgattaagtttattccatcgcaaattattccaattactgggatgattgcttccaactcgatggtcgccattggcttgagttaccgcagcttactggcgcaatttaaggatgaacggcaacctgttttggaacgactcgccttgggagcgaccgctaaacaagcatcaattgccattattcgtgagagtattcgtacggggatgtcacccacgatcgattccgctaaaacgatggggcttgtcagcctgccagggatgatgtcgggcctgatttttgccggaattgatccagtcaaggccattatgtaccagatattagtgacctttatgttattatcggcaacgagtcttggttcagtgattgcgtgttacttagcttatcgatcattttacaatgaacgggaacaattgattgatctttaactgattgcacaaaaaaacgcccgttcggcgtttttttagttatcgatgtttttgtttatagcgatagtacaggccaaatggcactaagttttcagtgccatttttaatgcgttgtagattttcgcggtgccggtagaccaggaaaagtaagaccaaggtcgcaatcgaaccgagtagccaatcatgcgtgtaaaacgataaaatcgcaatcatcaatggaccgaggatgctagccatgctaaccatacttgtaatcaggatgacactgataaagatggtactggcaattacgaagaaaagtggattgtatgccagtaagatgcctgcgctggttgcaacggcttttccccccgtaaagtgtaaaaagatggagtaagcatgaccgacaacggccgctaagccgacgattaagaccaatgcatgattggggatgtgaaaaatcatcggtaggctagcagcaagtgtgccttttaaaatatcaagaaataaaacggctgtcccagcgattgggccgagcacgcgatacgagttagttgtgccgatattatggcttccagcatctcggggatctttgtgacagaaaacgcggccgataataacgcctgatgggaacgaaccgatcaggtacgcaagaataaagataagactaagtttcatgacaaaaactcctatttgtggcatttgtttcccctattttagcattttgacaagggaaaaggaatattgtatgttagaataggtgaatacgaacatacatttgtattggcaagaaattttaaatttttgattgtaaaatcatccaaacttgttgataatataccttatctgttcatttttaaacaaaggagtcatacttgaatgccaaatcaaaaacaagattataatgataattcgattcaggtcttagaaggtctagaagcagttcgaaaacggcctggcatgtacattggctcaactgacggtcgcggcttgcaccatttggtgtacgaaattgtcgataacgctgtcgatgaagccttggctggttttggttcagaaatcaacgtcgtaattggcgcggataatagtattagtgtccgtgatcatggtcgtgggatgccgactgggatgcaccaatctgggattcctacgattgaagttattttgacagtgcttcacgcaggtgggaaatttacccaaaacagttataaaacatccggcggtttgcatggggttggcgcgagtgtcgtcaatgccttatccgaatggttgaccgtccgcgttgtgcgtgatggtgttgcctacgaagaacgctttgaaaatgggggccacccggttggtaccttgaaaaaagttggcaaagctaaagaaccaaacggcacgttaattacgtttaagccagatgggacaatttttcaaacgactacttataactacaataccttagcagaacgattacgcgaatctgcctttttactcaaagatgtcaagattacgttgaccgatttacgcgctgagccagcacgtgaagatgtcttccattacccagaagggattcaatcatttgtcgattatttgaacgaagataaagatacgattggtaataagttatatttcgaaggcaccaaagaagacattgaagtcgaatttgcgggtcaatataacgatggctactccgaaaacatcatgtcatttgtgaataatgtccggacaggtgatggtgggacccatgaagctgggatgaaagccggcttaaccaaagcttttaacgattacgcccgcaaggtaaacttgctcaaagaacgagataaaaacatggaaggctccgacgtacgtgaaggtcttagtgccgtcttgtctgtccggattccagaagaactcttgcaatttgaagggcaaaccaagggtaagctaggctcgccacaagcgcggacagctgtcgatagtttggtttatgaacaaatgagctttttcttacttgaaaatggtgaatttgcgcaagccttagtgcgtaaatcattaaaagcacgcgaagcacgtgaagctgcgcgtaaagcacgtgaacaaagtcgaaatggtaagaaaaagaagaaatccgatggcttattatctgggaagctaacaccagcgcaatcgaaaaatgcggcgaagaatgaattgtacttggtcgaaggggattctgctgggggttctgctaagcaagggcgcgatcggaaattccaagcgattttgccattgcggggcaaagttttaaatactcaaaaagcgaaattacaagaaattctaaaaaatgaagaaatcaacacgatgatttacacgattggggccggagtcggggctgaattcaaacttgaagacagcaattacgataaagtcatcatcatgaccgatgcggataccgatggggcccatattcaaattttgttgttaaccttcttctaccgctatatgcggccgttaattgaagccggaaaagtctacattgccttgccaccattgtataagctccaaaaaggtgctggggcaaaaacgaagattgcctatgcttggactgatgatgaattgaaagtcgtcgctaaagaaatgggtaaaggctacagtcaacaacgtttcaaagggttgggtgaaatgaatgctgatcaactttgggataccacaatggatccaacgagtcggacgttaattcgggtgcggattgatgatgcagccttagctgaacgccgcgtcacaacgttgatgggcgataaagttgaaccacgtcggaagtggattgaagaaaacgttaagttcacaatggctgaagatggtagcatcttagatacaacgaatggtcaaccagcaccgacaacttcaagcgctgaagtggatttatttgaccaattagacgaatagaaaagtgagtgattaaatttggctgatgaagcacaaaaaattcaagagctaacgcttgaagaagtcatgggcgaccgctttggccgctattcaaaatacatcattcaagagcgggcgttaccagatattcgcgatgggttaaaacccgttcaacggcgaattttatacgcaatgtccatcgatgggaatacttatgataaagggttccggaagtcagcgaagtctgtcgggaatgtcatggggaatttccatccgcatggggatagttcaatttatgaagcgatggtccggttaagtcaggactggaaattacgtgaaccactgattgaaatgcatgggaataatgggtcaatggatggggatccaccagcagcaatgcggtatactgaggcacgcttaagtaagattgctggtgaaatgctcaaggacatcgataaaaagacggttgatttcgttttaaacttcgatgataccgctgaagaacccactgttttaccagctcggttcccaaacctcttagtgaatggggcaactgggatttcagctgggtacgcgactgaaattccgccacataatttaggtgaagtgactgatggcttggtctatctattggatcatcccgatgcaacgttagaaaaaatgatgaccttcatcaaaggacctgatttcccaactggtgggatcttacaaggggtcgatgggattaagaaagcctatgaaactggtcgcggtcgagttgtcgtccgggcaaaaaccagcatccaacaattacgcggcaatcgggaacaaatcgtgattagcgaaattccttatgaagtcaacaaggctatgatggtcaagaagattgatgaattacgcgttttaaagaaggtcgatgggattgctgaagtacgagatgaaagtgatcggatgggcttatcagtcgttgttgaattgaaaaagcaagcggatagtcaagggatcttgaattatctgttcaaaaatacggatctgcaaatcacatataactttaatatggtcgccatctcgcatatgcaacctaaacaggttggcttattagaaatcctccatgcctacttggaacatcaagaagaagtcgtgattcggcggacaaaatataccttacaaaaggcattggatcgtcagcacattgtcgcagggctaatcaaggcgctctcgattttagatcaagtgattgcgacgattcgtggtagcaagaataaaaaagacgctaaagataatttagtggcaagctacgccttcacagaagcccaagctgaagcgattatttcactgcaattataccggttaacgaataccgatgtgactgctttggaacaagaatcagctgaacttgatgcagcgattaaggaataccggatgattcttggtgatccaaaagcacttgcacgggtgattaaggcgcagttaaaagcaatggtcaaaacttatcggagtgaccgaaaaactgaaattgaagcacaaattgagacgcttgaaattgatacaagtgtgactgttgttgacgaaaccgtcatggttgcagttagccatgacggctacttgaaacgtagtagtttgcgctcgtatcaagcatctgaaggggccgacagcggtttgaaagacggcgattttgccattttacaaaagccactacaaaccttagatcaattgatgatgttcaccaattacggacatttaattcaacgaccagttcatgaaattgctgatttgaaatggaaggaaatgggcgaacatatttcgcaatcgattggtttggcggctgatgaagcgattattgcagcatttgcctttaagccaaatgaacaggctggctactttgtgattgggacggatgatggctatattaaacaaactgccttctctgacctcttgccaagtcgaacatatcgttctaaggcacaagactttattaagttgcatgcagatgctcatgtgacaaacgtgaactggattccaagtgatgaagggctagccgtctttagtgctagctataaaggttatggattgagttttaccttatctgaagtctctgtatcaggtgctaaggccagtggggtcaaattaatggatctcaaagatggggatgttgtcatcggctttacgttatatcatccagaagataaacatgcagccgttgccattgtgacgcaacggggcgcctttaaacggatgctcttaagtgaggttggtttaacaagtcgtgcgcgtcgtggggtcttaattctccgtgaattgaagaaagaaccacatcgggtagcagcaatggttagtgttgagcaggcaagcgagttactgattcatactgatcagcaagaagtgattgcaattaacccttatcaacatgcaactgccgaccgttattcgaacggtagttttgtgatggatgttgatgaagttggacaaccggcatttgttcaaacgactattccagttaaaaatgaagacgagtcaaaataataaaaaagcaagtcatctatgtgatgacttgcttttttctgttatacataatatgcggattttttggttttgtactataacagcaaaataagttttgcacaatttaaatggtggggttataaaaatattttaagtagataaatagctataaatcaatctttcaaaagagtttaagagtttctaaacaatcaaaaagaaagggcttgcataaactatgtgatgtgttatactaaaattgtgaaaactgtgataaacaacacttgactaatggaggtaatccacatggtaaaaaccgaaaaaattaacttagccgactattgggacggctttaacaaaggtgactggcaagatgaaattgatattcgtgatttcatccaacaaaactttactgcctatgacggtgatgaaagtttcttagctggtccaaccgaagcaacaacaacgttaaatgatcaactaatggaattgaagaaacaagaacgtgaagcaggtggcgttttagccgcagacaatgataatcctgcaacagttacgtcacacggccctggttatttaaacaaggatcttgaaaagattgttggattacaaactgatgccccattaaaacgcgcattcatgccatttggtgggattcggatggccgaagatgccttggaagcatacggctttaagactgatccagaacaacacaagatttttaacgaataccgcaagacacataatcaaggtgtttttgatgcttatacaccagacatgcgtaaagcacgtcactacaagattattacgggccttccagatgcctatgcacgtggtcggattattcctgacttaccacggattgcagtctatgggattgatcgtttagctgaagaaaaagtccgtgactttaatggtgttggcgacggtgaaatgacagacgatgtcattcgtcttcgtgaagaaatcaatgaacaatatcgtgctttacaagatatgaagaaaatggctgctagctatggctttgatatttcaagacctgctaagaatgcccaagaagcaattcaatggatttacttcggttacttagccgctattaagacacaaaacggggctgcgatgtcagttggccggattgatacaacgatggatatctttatccaacgtgatttagagcggggcttaattacagaagctgaagcgcaagaaatggttgaccattttgtcatgaagttacggatggttcgtttcattcggacagaagattataattcattattctcaggtgatccaatctgggcaacattatcaatgtgtgggattggtatggatggtcgtcatcatgtcactaagactgccttccgtgtcttgaagacattggaaaatatgggtgctgctccagaacctaatatcaccttactttggtcagatcgcttaccagaaggtttcaagcgctatgcaacagaagtttcaattaagagttcaacgattcaatacgaaaacgatgatttgatgcgtaatgaatgggggagtgactattatgggattgcatgctgtgtttctgcacaaccaattgcagacggcgttcaatattttggtgcgcgtgctaacttggctaagacaatcctttacgcaattaacggcgggatcgatgaattaggcaaagctcaagtcggcccagcttatcaaccaattacaagtgaaatcattgattacaaagaattcatgggtaaatacgataagatgttagattggttagcagacgtttacgttaatgctttaaacaccatccactacatgcatgataagtattactatgaatcagcacaattggcattgaagaatagtcgtttagaccggacatttgcgactggtatttctggtctatcacatgcggttgattcaatctcagcgattaaatacggccaagttaaagttatccgtgatgaagacggtatggcagtcgatttcgaagcgcaaaatccagactatccacgttatgggaacaatgacgaccgcgctgacgatatcgctaaatggttagtgaagactttctatacgaagatgaatacgcatcatttatatcgtggctcaaaattatcaacatctgttttaacaatcacatcaaatgttgtgtatggtaagaatactgggacaacaccaaatggtcgtcaagctggcgaaccattctcaccaggtgctaacccagcatacggtgctgaaaagaacggtgctttagcatcattactttcaactgcgaagattccataccgttatgcaactgatgggatttcaaatacgtttggtgtcacaccaaatacattagggcatgatgatgaagcacgtaaagatgcgcttgtgaacatggtcgatggttacatgattaatcaagggatgcatttaaatatcaacgtcttcaataagcaaaccttaatggatgcacaacaacatccagaagaatacccaacattaacggttcgggtttcaggttattgtgtctacttcgctgatttaacgaaggaacaacaagacgacgttatctcaagaacgttctttgacgaaatgtaatctaacgaaagtggatagcaatatccgctttctggtaaggtcgttaacgcgaattaacgactttaccagaaagcatagcttttcttttaagaggtgaaagtgaaatgacaattaaatttacaacacggttatcaactgaaaatgttgttccagaaaccccgataacaccagaggtgccaattggatatgttcattcgattgaaacatttggttcagtggatggtcccggaattcggtttgtcgcctttttacaaggctgtcgcatgcgttgcgaattctgtcataatccagatacgtggaatattggtagcggagaagcttataccgcagacgaattaatcgcaaaggcactgccatataaggccttctggggtaaagatggcggaattacctgtagcggtggtgaatccttaattcaaattgattttttaattgatttatttaaaaagtgtaaggcacaagggattaatacctgtttggatacttgtgggcagccgtttacgtataaagaacccttctttagtaaattcaaagaattgatgaaatataccgatctttcaatggtcgatattaagcatattgatccagcggggcacaaaaagttaaccggcttttctaacgaacatattttggaaatgattgaatatatgtcaaatcatggtcatcatatgtggattcggcacgtcttgattccagaacggacggattacgatgagtatctcactcgtctaggggattatattcaaacgttaaacaatgttgaccgagtcgaagtgttgccctaccatacgatgggaatcgtgaaatacgaaaagatggggattaaatatccgttagcggggattgaaccaccgacccacgatcgcgttgtcaatgcggagcgtctattgcatacagcagactatccaaagcagcaacgctaacataagaaaattttaagcctttaataagaatgagcaacgaaaggggttgctctttttttatatctttattattataatgataggcgtaaactaaagaacggagatttgaaaatgaaaacaagacaagaaaatatcttctcctctaaaacattaacctatttcctacagttagcggaaacgatgaattatacccaagcggcacaactactcggtatcacgcaacctgctttaacccaacagattaaaaaattagaacggatagtcggcgcgcctttattttattcagtcggcaagaagttacatatttcggatgctggtcggacgatgttggatgctacccatcggattcatgatttattaaatactgcgacggatgaaattcaaagttcaacgagtgcgacgcgcggtaagattaatattgggattttagcatcgatggaaatcagtgttatccaatccttcttaattcaatactataaacaatttcctgacatcgaagtcagcatgcacttattgactcggaaagaaatctgggaccgacttgaaaataataaaattgatattgccattatgtatttgccagatgacagcattaagaactggaaaccttataagtcacataagattgtggatgaacgcttactctttatcagccaagatcctgctttaaagacgcgtaagaagatccgttttaaagatacattagataataaatgggtgacatacccagatgaatactatttaaatcaattcatcagtgaagcctataagaatcaattggttgatcgtccagtgagtgcggctcaattcacatcaccatttgaaatcatgcgttttgctgaagcaactgaattaagtacagctttaccaaagagtttttatgaagcacataatttgggacttaagggaaacgcggttcaatttgatccggccattcagttcgaattagcttttgtcttccgcaaggaaaaggaagatattccacggattaatagctttttccgtgaattcgaccattatttagaagaaaaagattatttaacacggattagagagcaaaaccgtagaatcgtctaatatttttggtataattaggatgttatttttttaaaaggaaggtctgtataaatatgagtaaagaattagtattcggtcaccaaaatccagatacagacgcaattgttgcggcaatggcgtttgcttatcttcaacaacaactaggaaacgacgtagaagccgttgcgctaggtgaacctaatgaagaaacaagctatgcattgcgtcattttgcagcagcaacccctcgcatcattaaagaagcaagcagtgaagttgacagtgtgatgttggttgatcataacgaaagccaacaaagtgttgccgatatcaaagatttaacagtgacgcacgttgttgatcatcatcgaattgcaaacttcgaaacagtcagcccattattctaccgcgctgaaccagttggctgtaccagcacaattttattatcaatgttcaacgaaaacaaagttgaaattccagctcaattagctggtttaatgatgagtgctatcatttcagatacgttgttgatgaaatcacctacaacaactgaaaaagatcggattgcgattaagacattggctgaaattgctgatattgatttcgaatcatatggtcttgaaatgttaaaagcgggcactaacttagatgataagagcgaagctgaattaattgaagcggatgctaaaacattcgatatggctggtaaaaaagtgcgtatcgatcaagtgaatacagttgatatcgaagcggtcttcaaacgccaagctgcttttgaagctgctatcgaagcagacaataaagctaatggttacgacttattcgtacttttgattactgacatcttaaacagtaactcagaagcgcttgttatcggtgaaccagcagaagcctttgaaaaagcattcaacgtaaaattgaacaaccatcgtgcacaattagccggtgttgtttcacgtaagaaacaagtggttccacaattaacagaagcattttaataacgattaataataaagtccttcggggctttatttttttattaggaggataggtaaatgaccgaggaaagcattgatgcaattcaagtgattgaagcgacaattcgaaattgccaaaagagtcagctgaagtttgtagcgggttcggctcaatttactttattaaaaaataggctttacgcattagaagttggtcgtgatttattgaacgggcacacagacataacagtcgaagccttagtcgaggcacaagccccgattgaatcgattattcataaaactgaaaaagcactctctaatcaaaaaaaacatcacccgtgataaaacgaatgactctattattagcagcgatgactgccgtgcagactgctattataaaccaactatctgcaaaaaagacccctcattaatttgggggcttttttgtgtgccaccagattggaattattctaatctaactaaaaatgtgttataatgtaaatgaattcataagaaggagcgattgacgatgaaacataccatcaagtttgccttaacaattagtgtgggtgtgattgcgctatgcttggcgtttttgctacatgagccattgtgggcacagattttagtgagtttagcggggagcttagtagcgctctcgatgtttattgagatgattaaaacgctaaaatctggtcaatacggggtggatctattagcgattaccgctattattgcgacgttagcggtcggtgaatattgggcagcattaatggtcttggtcatgttaactggtggcgactcattggaagactatgcagcgcataaagcaggccgtgagttaaagacattacttgataattctccgcaaacagcgcatcgccttgttaatgatgcggtcgaagatgtttcagtcgataagcttcaagttggtgatcaagtgattattaaacctggcgaattggtccctgttgatgggcatattattgcaggaagtgctttattcgatgaatcatcgttaacgggtgaatcacgccccgttgaaaaagcactaaatgatgagctcatgtcaggctctgtgaacggcgatacgtcggttaccatgcaagttgaccaattagccgttaatagccaatatcaagcaattgtacggcttgtagagacctctgcggcacaaccagcgcattttgtgcgcttagctgatcgatatgccgtgccatttacattagttgcgtatgtgattgctggagtagcttggtggttatctaaggatccagtacggtttgcagaagtgcttgtcgtggcttcgccgtgcccattaatattggcagcgcctatcgcgttaatctcagggatgagtcgtgctagtcgaaacgggattattgtcaaggctggcacaacaattgaaaaattagcgtctgctaaatcagcagcgtttgataaaactggaacaattacgaatggtcaattgacggttgaccaagttgtgccagtgattggtatcgcaccaaccgatttattgcaattggcggctagtgcggagcaagaatcttcgcatattttagcacggtcacttgttaaagcggcacaggtagaacaattacaaccaattgaaacattaaaagaagcaacgggcgctggggtagttgcgacgctgtcgtctggacaaacggttcgtgttgggaaacatcaattcgtgacgccagatgcgcaacagcctctgcaagaacaaaccactgtttacgttgcgatcaatgatcaatatgcggggtacattacgtttatcgatcatttacgaccagaagcaccggccacgatgcagacgctccatcaactggggattacgcgtttgatgatgttgacaggcgatcaagcgacaactgcgcaccagattgcggaacaagtcggaattgatgacgtccatgcaggctgtctgccagtcgataagattcatttaattgaacaagtactgcaagaccaacgcccactaattatggttggtgatggggtcaacgatgcaccgtcactggcaagtgctgatgtcgggattgcgatgggggcccatggcgcaacagccgcaagtgaatcagcggatgtggtgattctaaaagatgatttaggacgggttagtcgtgccgttcaaatcgcgcgtgacacgatgcgcgttgctcgccaggcggttttgattgggattgcaatctgtattgggttaatgttgattgccagcaccgggattgttccagcattagtgggggctttattccaagaggttgtcgatacagtttcaatcttatatgcattacgagctagaacggatcgttaagggaattaaaaagagccgtattaacaccattcaagtgttaatacggctctttttttgtttatttttcagattgtacgtgtaaaaccatgtcttttggtaaatataacttaggcaccatggctaaacaaatacatagaacgatgccggttagaatgaagctagcgataaagctgccaccgttaacagtgagcgagtatagccaagcattcatacctttgggagcgtatgagccccaataaacggcaccggctaagaagtggcagaagtattttgcaaaagtaccaaaaaatgcggccatcaataaaagggtcatcgttttgacttttgtatgattttgaatacttgcttgaataggtcgttgtaagatacctgctaaaccaacaaccatgaaggcaatggtaaattctagcaatccttgccatacgttcaagacactaccgtttcctaatccacgtaagattaagtctagtagaccccagattaagccggagaccattccaggaatggcaccacggcgtaaactgtagattacaatagggataatcccaaaggagacttcgattgcggaaggccccactgtatgggggatgtattccaatgccacggcaaatgccgcgatgattgccccttcaatctgaatcaatagacgctgatgttgcataaaaataaccccttttcttgttcaaccaacacaaaaaaggagttatcatttcaactccatcacaattcctacgcttgtcttaacaaacaggttcgaagggtctgattaaaatcactctcagccaatggctcccctttgcgatggttaacatttaatttttaggaacgctttcagtatactcgatagctggtataagtcaagcaatgtgtaaatcgacgaattgatgtaaaccaaatgactgttagaacgacattgataatcgttgccaagaagagcactaatagtggctattcaagctggtccattgccgagcgttgttcatcagcaacgacgtgcgtatataagtgagtagcttgcgtggtcgtttggcctagttgggtcgcaacaattgtttcactatgagttgccgccatgagatcagtggcaagtgtatggcggaacttgtgtggtgtgagacgcacgccaaatgcttcagaatacttcgcgactaacttttcaatggcatagttgctcatacgcttggcgctgccacgatagcgactgacaaataaggcttgttcattatcttcttttagatagcgtgatttacgaatctggcagtaatcccttaaaaaaggtaaactccacggagcaattgggacagtatcttgctgtccgcctttacggatcacggtaattgtaagttgttcaagattcaaatcgttgatgttggcttgggccaactctgatagtcggatgcccgttgccagcgccagtacacagatggcaatatcgcgttcgcaattttgcttgtatgatgccagttggcgattagaaagcaagttagggtaatcaacttgcatgaaggtgatgaagtcgtgtttcttttcaccggtcagcagttgtttgctgatgtgtcgtgaacgtgtcgccattgtttctgaagctttaagtagtttcaccttcttcatgacgtttcggtaaaaataaggctcaccatcagcttgttcggcttcaatggttaagaagtaccagagcgcatttaatgcgttaatcgagcggttaacggcttgaaaggagagcttatggttattttgtttacgcttattcattagaaaaatcttgtagagctcaatatcttcgagtttcattttttcgagtgcggtcagtggcatctggtcgatagaggggaccgcgacgatctgttcatcaactaaccaggtgaaaaagcgaacgtattcttgtaagtattgatagagcgttgcagaagagtaggcgtttgcctggcggttaatgtagaatttacgaatgtaatccggaagattggcgagttgcttttcgcagagttctaagtaacgttgttgatccatgatggaagactccttaattaacagtttaaagatagtttagcaaaaatgaggtgagaatactacaagtgttgttaaaaccataattttaacaacacttgtattgcaaaccgttccgcaaactgatgatcagatggtcttattcgactatctgcatagcaacctaaagatccttattccgtttaaaagctggtatatcaacgtttaaggccttttttaacgatttgatatgtgagttttaaggctaagatgtgttaatatgcgtatttaccaattaaaatctggcataatcgtcagattaatcacggatttgtgcctgagcttagatgaattctgcatttaaagttaagtttggcgatatcggttggccagtcagtttgattcatcatattggcgttgagtaacttgtaatagtttatgaatcgtgcagtgtaaaaaacaaacgcgttaagtgcggttcatcaaatcaattgaatgatgttggataataagtggttattttagcgctctttcaagggataagtatttcttcgcataatatatattatgtaaactaaaatagatttaaaaaattagctaagcctacccactcgtcaccagcgtttaagcgcagcaaaaaagcgccatattaaaatgacgcttctgtaattagtgatttaaaaactgagccaacaaagctgcaaagtcatttggattttggaataacgccatatgaccagcatctgggtaaagttttaattgggaatttaaaattcgttcatgtaattcatatgaaccattaacaggtaccattcgatcgtgatcgccgttgacaatcaatgttggttggttaatttgtgccaggtttgccggttgatcgtgcgcatactgtttaattgctattaattgacgacgataagcggctaacgtaatggctttatcttcaacaatttcacgctgttttaaccggttaatgaacgctttaccagcctgtttgccttggggcgttctggtgaagaagaggtattccttaacgtctctatgcgttaagaaggactgaattaagtcaaaagttgttatgcgccccactttggcgatttctgagtcaccctggggacctgttccgactaaaattaagtgattaacgcttgaggagtattttaaagtgaaggcctgtgcaacaaaaccacccatcgataatccaagtaaatcgaattgagtgagctgcatagctgttataaaagcataacaatcagctaccatttgctcaatcgtcgtggggactttgccatccgagaaaccaacaccacgattattaaagacaatcacgcgtcgttgctgactgatcaggtcaattaatgcagggtcccagttatctaaagtggctgataagtgattcaataaaacaagtggtaagccgcgaccggtacccacttcgcggtaagcaaaccgttggccttgttgatcttgaataaattggttgggggttgttagataagtcatcttgattagcccgcttgaaccttaatcaccactttaccagtctaatataaacgattcttttggatggccgtgagcaacaagttctagtgcctctttaacgtgtgctaaatcgaattgatgcggatcgatggctggtacaatcgcttgttgttcaataatttcagtgatttttttgagttgggcaccatctgaacgaacgaaaataaagcgatattcaacgcccgcttttttagcgaggcgatcccatttccgcccggccaacgagaataagagttgcttccaaaatggtaattgcaattgtttagcgaattgtttgtttggaccggcaatcaagcttaaaatccgcccgcccggcttcataatcgccatttcacgttcaatatctgctccaccgcgtgtatcaatcacgtaatcgatttgatctaaaacttcccagtaatcggttgttttgtaatcgatatattggtcagcacccaaattcaaaatgtgatctcgcgcgactgcattgcctgaaacaatcacggttaagcctagtgattttgcgattgggatggctatttgaccgaaaccgcctgaaccaccagggataaacagcgttcggttcggttgggctgccaattcctcaaatagcccctgataagccgttaagccagtcagtgggattgcaacggcttcacgtagcgataaatcctttggcgtgtaccagattgcatcggtggtaaccgcgacatattcagcaaagccaccgattttagccaatggtaaacgcgcatagacttgatccccgactttgaaatcagtgacgtctgttccaatcgctgtgatttcaccggcaatttcattgcctaaagtcagtggtaaagtatagttttgcattaatttagtatcgccgcggatattcattggatccaatggattcaccgctgcataggcgactttgacgagtacttcattggctagcggttgtgggcgatcaatttcttgaatcgtgacagctagtgtttgattatattttttaatttgagctgctttcatattagaaaacctctttccacgggagtgtttgtagggtttgttgcacaattgctgttagcgtagttgaatctgggttcactttagccatgacccggataccaatgagcgcactttgaagcgatgcagctaaaagatcaattgcaacagacggttctagttcggcctggccggcaatcagtaatgcctgcaacagtgctttttcttgggttaaataatgctgaatcagcgtttggatgtctggttctaatgaatttaacgttgccgcggtattcaccactaagcagccggctggttggttatccggatggtcaataaatatttcaaaaatggctgttaagcgcgaccttaaatcggtatgtgttgccagtacttgctcgaaacgctcgttaatttggtcacgataatgtgctagtacttggataaacagttcatgtttatcgccgaatgtatcgtaaatactgcgccggtgaatccccattgcatcaactaggttttgcattgaggtattctcatagccttgttgccaaaagacaagcatggctttgtctaagacaaccggtgcttcaaatgtttttgtccgcatctggatgctcctctcttattagaacgttcattgaaataacgcaactagattttgcgcaattttaaggggcaataaaaaagaacgcctcgaatgagacgttcttgtcagctgttattttgtccgatagaaaataccaaacgcccctaggccaacgtgactcataatgaccgggctggttagtgcgactgtataaggcacatggggctgtgtttcttcaagcgttgcttggatcttagcggatagttcatccgtgattccgacgtgtgagatgccgatttccgcaacgtcttgggtggctaagtattcacggatattgttgagttcttttgtaaaagcttttagtccccgcccctttgcgacgacttctaattccgtatctgttaagcgcacaattaccttgagtttaatgattttcgttaatagcccggccattctactaattcgaccaccgcgttgaagcgcgtcaagtgaatctaaaaagacgtaggtttcggttttacgacggatgtcatcgagatgcgcgataatatcatcaagaggcttccctgcttcaacgtcttgggcggcagcaaccacttgataagcaagtccacggtcgattgctttactatcaatcacgtgtacgtcacttgttgattggtgggctgctgtgtgtgccccttcgattgtgccacttaacaagccggtacaatgaatcgatagaatcgtactaccatcagcccctaattgatcatataaatcgacgaaactgccgacagttggctgacttgttgttggaaaatcggtcgttgcattttgtaagcgacttaaaaattcagcgcgggtaatggtttgtccatcaatgaaagactcatttccttgttgaatcgttaaggggacgatgtgaatgtcatatttagcgcgttcgtctgctgtcagttgaatcgatgagtccgttacaattttaattgtcatatgagttgtactccttcaagttaaatgttgaggtaaattgaaaaaaacatcagggtcgttccgagcattacgaaaaagtgccaaatcaaatgtaagccaggaattttaggaaaactataaattagagcgccaacggtaaagactacgccaccactgactaacagccaaaaaccaactggactgaggttgacataaagggtcttaccagctaataaacataaccaccccatcacaacgtaaatcgttgtttcaatcttttggtaccgaccgtggctcaaaatgtgcgttataataccggcaatcgctagtgtccagattgcaatcagtaagctaattcctgttgcatggccaataaaaatcaaacaatatggcgtgtaggtaccagcaatcagcaagaaaatattgctatggtcgaatatttgaaacacgcgcttggccttggtaaatgctaagcagtgaaataaagtcgaagcgagatacagtagcagtaatgtggcgccatacactgctagactagcaatcgcgactggtgagagtgttttatgaatgcttttgaccaggagcatgatgactaacgttaaactaccgaaaaaaccaatcccgtgggtaatggcattccatatttcataaatcagttgttgtcgtttaatcgtggaaagttgcatggttctcgcctctttttctctatttgccgagtattatagcgcgaatgtagattataagtcaatagataatagaattcgattctatgttagtgacaaatgataattgctatggcataataaatatactatcaacagattggtggcgttaatcagtatgcaatcacaagaatttgaaaaatggttgggtgactttcaacaattgcggttaccattatggtctgaatttccagatttagacctctatatggaccaagtcattagtgaggtcaataaacgactgagtcctttgttggacgttaaaataacgaaaacaatgattaatagctatgtcaaaatggcgattattgaacgaccggaaaagaaacgctataatcgggatcatttagccgaattgattgtggtcagcattatgaaattagtcttcccgctcgatgtcattaaacaagggatttcgcaatcgttggcaaacgacaccgctggtaaggcatatgatcagtttgtgcggttatttaatgccgaaattgcgaatattaacgcgcaatcaacggttaatgaattcaatttaaacgaggaaccgctcaacattgttcaaaaagtagccgttaaatccgttatttataagctaattgggacgaagttggttaccttagaagaacccgtttctatcttataagtcacaaaaaaagcctgtcgaattgttcgacaggcttttaaattaggctttatcaaaatctttaatccaagcaagtgcaatggctttttcaccaagatgggtcccgataactgggccaaagtagctgatatcaattggtaagtctggatagtttgcttgaagcttatcacgccatgcaatcgctgctggttcatcgttagcgtgaatgattagtgcgcgtaatggatagtcaacacgttcggctgtttcagcaaaaatttgttcagcgcgggcgtaagccttcttcaatgaacgaaccttctcaaatgccgtaattttgttagtgtcagcgtcaaacgttaaaagcggtttaatcttcaacatgctaccaataaaagcagatgcgtttgataaacgaccaccacgcactaagttttgtaagtcgttaacaatgaaacattcatccattgtgctttttagatcgtcaaggcgtgcgataatctggtcgacggtcacttctgggtcgcgtgccattctggccgcttccattgctaagtagcccattaacatcacagtaatccctgaatcgtatgggacaacctggatgttatcgatggtgcttgccgcatttttcaatgtcgtgacaaacccagagatggtactagcaaggtggatgctgatgacagcatcatacccttcgttgccgaggtcttcgtatagttttaacatttcacccagtggtggttgtgatgtactggggaatgtttcggatgtttttaatttttgatagaactcttcagtggttatatcaacgccttcatcatagacctggccatcaaggataaccggaataggtacgacgaagagatgatggtctttcacttgctgttctgtgagataagcggtactatcagtgactacagcaattttcatggtgacacctacttttttattattcggtaataactatatcataaatggtaggttaattcccctaaaaatgccgattttccgaaaaatgtatagggcgtctcattttaatggtcgattaaagctttgataataacggttcagtaggatttttaaaagttgctgttcatcggtactccagttttgttgaatgtgattttcaagtgcagtttgaagttgttgcaacgtacttaatgccgtcttggcggtcggtgttaaggcgtaaacgcgttggcgcggatcagccccggtcacttttgttaacagcccttcttgagccatcgtatttaactgccgactgagtgtcgatgcatcgagtttggttaacgtaattaattctgcgtgcgaaatgcgttcttgatcgggttcaatggccattagaatgttgacttgggctaacttcaagtcgagtcgtagcgcccagtgtttcttttgttcttgatacaatagattcagttgattaaacgttgctgaggttgagcgcacggtaaatccccctttaattgtataaagcaatttgataattgtattatacaatagtcgtgttagcgattgcaaacaactaatttctttgaggttccactgcaaaaccgttacaataagtaagacaattcaattatagagagtgtgagcaataatgacctttgatggtttaatgacccacgccgttgtaaatgagctaaatacaactttagcagacggcaaaattacgaaaattcaacaaccttatccaaacgaagtaatcttaacgattcgggcaaatcgtaagacctatccccttctcctatcagcccacccatcttatgcgcgagtgcaagtgacgcgggtgccttatgcaaaccccgcaacgccaccgaacttcgcgatgtctttacggaagtatttagatggcgccattttagaaaacatcgagcaaattgaaagtgatcggattctaagattcacctttaaatcacggaatgaactgggggacttacaacaactatgcttaatcgttgaattgatgggccgccatagtaatgtgattttgattaatcaagcgaccaataagattctcgatttaatccggcacgtcggtgtttcgcaaaaccgttatcggttcttaatgcctggcgccgattatgttaatccaccggctgcaaccggggttgatggttttacgactgatttaaagacgcttgattggttaagttattataacgaagctgctgatgaacaagtcaaatggttacaacaacacttccaagggatgagtcatgaaagtgccgttgaactacaaacccgtttaatggatcatgacaattatttggcggttgtgactgatttcttcaagcaattcgaccaagtgacaccaacgttaacagttggtgacaagaagtcgtggttcacggccttcccttatgagagcctgacagggacactgagccattttgacacgttgagtgagctgttagaccaatattacttacacaaggcgcagcgtgaccgagtgcagcaacaaggtggtgcgctcatccacttcatccgcaacgagattcaaaaggatgaaaagaaactgaaaaaactacaaaaaacgttaaaagcagccgacagtgcggatgattaccggattaagggtgaaattttgaccacctatttgcgggaagtcgaacgtggcatgactgaagtcacgttgcccaatttctacgacaataacgaaccgcttaagattaccttgtcgaaccagattagcccttcaaaaaatgcgcagaagtatttctcgaaatatcagaagctccggaattcaattgcctacgtcaatgaacaaatggcaaagaccgaagcagaacttgcctacttcaacacgattatggcgcaaattgaaattgctgaacccaaagatttagaggatatcaaagctgaattacaggctgaaggttatttaaaggctaagaaaaccggtgccaagaagcagaaacgttacaagattagtgaacctgaagttttctatgcgagtgatggcacccggattttcgttggcaagaataactatcaaaatgatcaattaaccttgaaaaaagcccataaaactgatatctggttgcatgtgaagaacattcccgggtctcatgtgattattgatagcccagatccatcagaagatacgcttcaagaagccggcaacttagcggcctacttctcgaaggcgcgcttatcagcggccgtgccagttgattatattcaggttaagaagattaaaaaaccgaacggtgcgcgaccagggtttgtgatttacgaagggcaacaaacactttatacgacaccagacgagcaactcgttcaaaagctacgtaacaaacctgtgcaagactaataaaaagcgttactccaaagtgaattggggtaacgcttctttgattggtgcggctgatggcacacgctaaacgtgttctgcaagccattactttccggttaacactctattctaatgggcgtctgaccatgcttgtgggtcttggcgccattcattgagtgatgtggcttgttctggagttaagttatcagcggcttcttcgaccgctaataaggcggagaaattcgataaggtcgttagtggtaagttagcagttgcgaaattctgttggccggctgccagttcgtatgaaaagatgccaaaaataccaaggacttctgcgccctctttttgagcggcagccgctgcttgtaagacactcccgccggttgaaattaaatcgtcaatgaggactaatttttgaccggctttaaacggtccttcgatttgacggccttgaccgtgatctttcggtttcgaccgaatgtaaaccatcggtaagtcgagttcggctgcgacccatgcagcatggggaatccccgcggttgctgttccgccgatgacttcaacgtctgggaattgcgctttgattgccgcagctaagttgctggcaatgagcttgcggacttttggataaccaatcgttaaacggttatcgcaatagatgggacttcttagcccactcgcccaagtaaaagggttgttaggactgagactgacggcatgaatatcgattaaggcttgtgcgacttggtgtgcaattgttgtcatttgaaagactcccattctgatttgatagcttggtaagcttgatatggatttgtagcttgcgtaattgggcgcccaacgacaatcgccgagctctcagcttgtgcggcttcgtgtggtgttacagcccgtttttgatcattggtttggcttgttgctggccgaatcccaggtgtgacgcagagaaaatcagcattggtgtgttcgcgaatcgttggcacctcttgagcggaacagaccacgccatcgcaatccgagttctgtgcgagttgcgcatagtgcgcgacagattctggtaggctgacattaacgagttgttcggtttgcatttgcgcttcgctggtcgacgtgagctgcgtaatcgctagtagtttagcgggctgcacgttggcgagtgcggcgccttttttcagaccagccgcccctgctttgagcatggcctgcccaccagctgcgtgaatcgttgtgtaatcgacaccgagttggccgattacagtcatcgcgctttgaaccgtgtttggaatgtcatagagttttaggtcgagaaaaatccgatagccgcgcgcttttaacgttttaatcagctgtggtccctcttggtaaaaaagttccatgccgactttaacgaataaggattcatcagttggaaattgtgctaaaaaacgattcgttgtttcccagtttggaaagtcgagcgcgataattaaggggttagtcatgagtgccctcctgtggtagaccgaatgattttaaatcggttagttgatatttagcgagttcatctggtaatgcggcgattagctttggacaggcaaatggatcgctgaaattagcagtgccgactgcgatgacattggcgccggcggccattaattcaagtgcatccgcagctgttgagacaccgcccatcccaataatcggtaacttcgaaattgaacggacttgatgaatgagccggatggcaacgggcttaattgctggcccagataagccgcccgtttgattagcgagaattggttggcgtgttctcggatcaatccgcatccccaccagtgtattgattagcgagaagccggctgcccccgctgcttcgactgcttgcgcaatcgggcgaatatccgtcacgtttggtgagagcttcacgtaaaccggtacttggctgactgcaacacaggcctttgtcaacgtggcagcggcttctggtgatgtaccgaattcgagaccgccatgggccacgtttggacatgagatatttagttcgatggcatggacgttgggtgcctgactgatgcgttcacagacataaacgtaatcggcttcagtattgccagcgacattggcgatgattggtaactcgggataatgctcggctaaccagggtaatttttcttgcataatgacttcaatcccgggattttgtaagccaatcgcgttcaacatcccacttggggtttcagcaacccgtggtgtcgcattgccaagtcggggttctttcgttgccgctttgataataattgcgccaagttcgttgaggtcataatagcgaccgtattcctgaccgaagccaaaacacccggaggcgggcataatcggattttttaaagctaagcctggtaaagttactgctaagtctgtcattaaatgagcacctcgtttgttttgaagacgggtccgtcatcgcaaattttgagctgaatgcttggatcacgtttgagtttggtgacacaggcgtagcaggcaccaatcccacaagccatccgttcttccaatgagatataggcattgggatgctcactgaatcgattatcgacggccattaacaagccttttggtccgcatgcgtaaatagcatcatatcgggttgtcgcatcagcaaactgtgcatcgagtaataaaccaacatggccttggtagccgtacgagccatcatttgtcgcataagcgactggcccgagcttgcgaaagtgatcttcatagaaaatggctgctttagttgcaaagccgaacacgtgttgaacgtgaacgccttttgcattaagttgccgtgagagttcatgtaatggtggaatcccagtcccgccaccaatgattagcgcgttttgtccggctactaattggtcaattggataaccgttaccaagaggccctaagacggacaagcttgtgctcaccggtgattcacttaagatcgtggtgccttcaccaacaacgcggtataacaaggtaatcgtgttagtttggcggtcgacgttggcaatcccaaatggccgacgtaataaaagggcgtcactggggattttgatatcgacaaattgtcccggtgcaatgggttgctgtgcgaggtctccggtgaggcataattcatagatactgggggcaatttcggtttgcttagtgagggttaattggtattctaatggcaacatttagcagactccttctgatttttatgtaataaaagagccttaggcaaagggcttcagactcttttagtggttttaaagtggtttggtcaggagcgattgagattctaggaccgctaagatcgcatcagcggtatccaatgaggtcatcaatggaatgccgtgttcaatggcggtttggcgaatgacgatgctgtctttagcgacttgtggggcttcgttcaagccggttgtgttgatgaccagttgaatgtggccggctttgattttatcaagtaaatcgccgctcgtagcattaatcttggcaacggattgcactggcacacctgctgcttggaattcttgactagtcccaggcgtggcaatgatttgatagccaacttcgcggaagcgttttgctaattcgagcgcttgtgtcttatcttggttagtaattgtcattaagacgttcccgtgacttggtaagtgcatcccactagcttcgaacgctttatagagtgctttttgcatcgttacgtcagttcccatgacttccccggtcgatttcatttctggcccgagtaagctatcaacccgcgtgagtttcgagaatgagaagacaggtgctttaatatgaattagtgggcccgctggtaatagaccggttgggctctttaattcagctagtgtgctgcctaaaatgacttgggtggccagttgcgccatcgagatgccggtgactttactcaagaatggaacggtccgactagcccgtggattgacttcaatcacgtagactgcttcattttggataatgaattggatgtttaacaagccgcgacattcaagtgctaaacagagcttggtcgtgtaagtgatgatggcttgtttttccgcatccgtcagattttgtggtggataaaccgccattgaatcgcccgaatgaacaccagcgcgttcgatatgttccataattcccggaattaagacatctttgccgtcacagatggcatcgacttcgcattctttgcccattaagtagcggtcaattaggaccggttggtcgactgaaactttaacggcctctttcatgtaatgtgtaaggtcttctgcagtatgaacgatttccattgcccgcccgcctaaaacgaaactaggtcggattaagaccggataaccaatctcttcagcaatcttcaacgcatctggcgtattggttgcggttgccccgactggttgtggaatgtcgagttcggcgattaattgatcgaattggtcacggtcttcagcgcggtttaagttcgcgacgcttgtcccgagaatctgcacaccattttcggtcagtggttcggcaaggttgatggctgtttgccccccgaattgcacaatcaccccttctggtttttcgagttcaacgacgttgaggacatcttctagtgtcagtggttcgaagtacaatttatctgaaattgaaaagtcagtcgaaactgtttctggattactgttcatgataattgcttcgtagcccgccttttggatggcttgcacacagtggacggttgcataatcgaattcaaccccctgcccaatccgaattggaccggaaccaatcactaagattgaaggctttgtgctgacaatgctttcgttttcttgttcgtaagtcgcgtagtaataaggtgtttgtgattcgaattcggctgcacaagtatcgaccatcttataaactggctgaatgccactttcttggcgcatttggcggacttgggcaggcatgatttgccaagttgcggcaattttagcgtcggcaaagccatttttcttggcgagttcgagtaattctaagtcacctttatcggtccggagttgttcttcaatttcaacaatgtggctgagtttatccaggaagaaaagatcaatttttgtcaattcactaagttcttgaattgaataaccgcggcgcaatgcttcggcaaggtagaaaagtcggtcgtcttggggatgtacaatccgttggacaaggtcgttatcaccgactgccgtcaatgctggaatttcgagatggtcagtgccaatttcaagtgagcgaacggctttgagtaatgcttcttcaatgttgcgtccaatggccatcacttcaccggtggccttcatttgggtgccgagttgccgatcacctttgttgaatttatcaaatggccaacggggaatcttcgcaacgacgtaatcgagcatcggttcaaattgcgcataggttgtcccggtgattggattatgaatttcatcaagtgttaaaccgatggcgattttagccgccatttttgcaattggatagccagttgctttagaagcaagggctgatgaacgactcacccgtggattgacttcgataatgtagtagcggtcgctattaggatcaagggcgagttgaacgttacagcccccttcaatcttcaaggcgcgaatgattttaagtgcggcatcgcgcaatgcttggacttcacggtcacttaaggtttgaacgggtgcaaatacgatggaatcgccagtatgaatcccgactgggtcgaagttttccatgttgcagacgactagcgcgttgtcatttttgtcgcgcatgacttcgaattcgatttccttgaaaccggcaatactttgttcaacgaggacttgtccgactggagataggctaagcccgtttttgacaattgtgctcagttcaccggcattttcggcaatcccgccaccagtgccaccaagggtaaaagctggacggataatgaccggatacccgttttcgttaacgaatgtttgggcttcaacgagtgaatgggcaatcgcagattctggaatcggttcgtttaactgattcatcaagtttttaaacagttcgcggtcttcagcttgatcaatcgcgctgagcttggtaccgagcaattcaatgttcagctcggcgagaatcccgttgtttgccagttccaaagccatatttaagccggtttggccgccgagggttggtaagatggcatctgggagttctttgcgtagaatttgcgtgacaaagtcaatcgtgatcggttcgatataaaccgtatcagcaacggctttatcagtcatgattgtcgcaggatttgagttaattaaaacgacttggtagccttcttctttaagcgctaagcaggcttgagtgcctgagtaatcaaactcggcggcttgaccaattacgattgggccagagccaatcactaaaattttatgaatatcggtacgttttggcatcactaaatcccctttttactatttttggcggcgattgaagtcatcgatcatgtcgataaattcatcgaatagatgtgcagcgtcgtgtggaccaggggctgcgtctggatggaattgaacggaaaaggccggatattgtctatgacggagaccttcgactgtttgatcgttaatttcaacgtgtgtaatcagaaggttttgtgggtcgatggagtcggcatccacggcgtacccatgattttgagatgtgaagtcgatccgtttggtggcaacttctcggaccggatggttgaaaccacggtggccgaacttcatcttgtaggttttagccccattggcgagggcaaaaagttggtgaccgagacaaatcccgaaaatcggcactttaccttgaatccctttgatcatttcaatggcttctggcacatcttctggatcaccagggccgttggttaacatgacgccgtctggatcgagactcagaatttcttcagctgttgtgttgtatggtaagacagtgatgttacagtcgcgttttgacagttcacgaaggatactatgttttaagccaaagtcaatcacgacgatgttccgcccgttagcaggactcggataaggtttggccgttgagacttgttggacttggttttttggtaagaccaatgccttgagttgatcgaacgcgtgatcgtctgcggcatcaacgatgctggctttcatggtccctttatcgcgcagacggcgagtgagtgcccgcgtatcgatgccggcaatcccaggaattttcttttgctttaaaaagtcatcaagactcatattcatccgccagttatttgctaggcgtggtgtttcatggacgacaacccctttacaggttggtttaatcgattcaaagtcgtcgcgattgaccccgtaattaccgattaaagggtatgtaaaagcgatgatttggccgttgtatgattgatcagtaatggtttcttggtacccactcatcccggtgttaaagacgatttcgcctgtcgagataattggggcgccaaaaccggtgccggggaagatggtgccatcttctaaaataaggtaacgtttcatcttttagttcactccttttgatatgcaatctgaccagcaaccaaggttaataaagtatcaccttgcactgcttcgccgataaatggcgtgttgtggcctttcgataagaaagtgtttgcgtcgattgtggtggtatccgttaaattaaaaacagcaaggtcagctggttggccaaccgctaactggccggcgtgtggtaagttgaaaacatgggccgggttggttgttagccagcttgtcagttgcgcgagactaaatggaccgttggcaactaaatgtgtgtataacaagctaaaggctgtttcactccctactataccaaatggcgctttcaataacgactgttgtttctcttctgtggtatgcggtgcgtgatcggtcgcaataatatcaatcgtcccatccattaagcccgcccagagtgcttggcgatctgcaagtgttcgtagtggcggattcattttgagcattgcgttgtcactggtaatcgctgaatcatcgagtaacaaatgatgtggggtgacttcgcaagtgacgttgaggccatcttgttttgcgcggcgaacgagattgacggtttccttagttgagatgtggcagatatgataatgaacgccggtcgcccgtgctagctcgatatcccgggcgacttgggcggattcactgacactcgcaattccgggaacgcctagttttttagcggcttgaccgtcgtgaatgacgccgccgttgacgagtgattcatcttcgacgtgcgcgacgatgggcatgttaatctgggcggccatctgcatcgcttggtacattgtttgtgccgtttgtaccccatgaccatcgttggtaaagcctgctgcaccagctgccttaaacgccgacatgtcgacaattgtttgttcagttaactcattggtaatcggtgcaaattgatatgtgtggacgctggtttctgcctgattgcgtgcaaccagtgtcttgaaatctagcaagttatcaggtacgggctttaagttcggcattgcaattacgctagtaaaaccaccgtgggcaaccgctgtgctccctgttttgagtgtttcttttgtcgtgaagcctggatctctgaagtggacgtgtccgtcgattaagccggcactgacgaaatggccgtgtgcgtcataaatcgtttctgggtcggttgggactgcggtaatcgttggttcaattgccgtaatctgaccggttgcatcgatggcgatgtcgcgtttttgcagttggccgtcaatcaagacttggccgtttttgatcaattgatacatagcagatccccctcttaatgttgaatcagatgttgttggtctaataggtgttcaatgatggccatccgcataaaaacgccgttggtcatttgtttaaaaattcgcgattgtggggcttcaacgagttcgtcggcaatttcaacgtcacgattgacgggtgctgggtgcaaccagatagcactggacttaaggtgtgctgcccgctcagttgtcaaaccgtactgagtatggaatgcagtgtcagataaggtttcatcggcagcaaagcgttcgtgttgaatccggagtaacatgacgacgtcaacttctggtaagacgtcatcgagttgggctggttgtccgtattgggcaaattcaggggcgaaccatgcctcagggccggcaaaatacaatgttgcgccgagttgtttgagcagttgcatatttgaccgtgccacccgggaatgacgcaagtcaccacagatgacgacttttaagcctacaaagtggccgaactcttcgtgaatcgtcattaaatcgagtaagcattgggatgggtgttgcccactcccatcgcccgcattggccagtgccatgtggaattgatcatctgcgagtaaggcgtcgtaataattattctgagaatggcggacagcaacgaaatcgacgccaatggcttgtaccgttttgagcgtatcgctgagggtctcgcctttggaagtcgaactcgtatcggcattgaagtctaagacggtcatgccgagtttgcgttctgccatttcgaaactcgtatgggtccgtgtgctattttcaaagaataggttcattgcgtagaccggccgagttaatttgcttgtcgcgccctttttaaaggcgctagcgcggttgatgagacctgcgactaaatcattggtgagttgatcaacggaaaccaacgcgttatgcttttgcattttgttgagcctccaattcaagttcgctctttgctttatccggtaaaacaaggtttaagacaatcccaaggacggtggcgatggctagccctgagaattggtattggcctaattgtaagtaggcattgccaatcccgatgacgaggattgatgaaccaatcattaagttgcgtttcttatcaaaatcgacttgtttgtcgattaagacgcgcaaaccgcttgaggcgatgaccccgaagagtaagaagctaatcccaccaattacgggtgtggggatgctttgaatcaacgcgctcagtttgccgatgaagccgaagatcatggcgaagaatgcggcgccacctaagacccagacactgtggactttggtgatggcgaggacaccgatgttttcaccataacttgtgacgggcggtcctccgacaaaagcggcgatgattgaggctgtcccgtccccggctaacgtgcggtgaagaccaggatctttaaagaagttacgcttggtgagtttgtttaagaccataatgtggcccatgtgttcggtcattgtgacaaaggcaattggtgccatgctgagaatcgcgccccagtacagaccgggtttgtaagtgacaaatgggacttggaagtctggtactttaaaccaaggggcgtccatcacgggttgaaaatcgacgatcccgaacaagacggcgatgatgtagccagcaatgatgccgagcaagatggggactaagctcatgaatcctttgagatacatattaaagccgatggtgattaacaacgttagtaaagcgactgcgaagaattttaagtcgtaattcccgtgggcattgatagtggcttgtttggcagctgtgccagcgagtgataagccaatcaccatcacgattgggccgacaacaatgggtggtaaggctttgtcgatccagtcggaaccaatcagactgactaagattgaaacgattaagtagactgccccaaccgccattgtcccttgtgcaatcccagggtagccagtcgttttcatcaaagcgagcattggcacgatgaatgagaaactcgaccccatgtatgctggaatcttgcctttggtaatcaagaggtacattaaggtgccgaccccggaactgaataacgcaatccctgggtttaaaccaactaagattggcactagaacggttgagccaaacattgcaaacatatgttgaatggataaaccaatccatttaccggtgctggggcgttcgttgacgtctaagaccgcatcgggatttctaaattgtgtagccataagtatttcctccatgtcgccgactttttgaaccaaaaaaagacacacgctccaacagattggtaggtgtgtcccttgacggacttaggcccctttttttaggcgcactaagttcaagacaaacccttttgctctctctggagacaattaaacggttcagtcgttatttagttagtttttcgatggtaatcccatcatgttgatcaatttcttccatcgcaacgcgaatttgttcgttgagggcggttggaatatttttaccgacaaaatcggggcgaattggtaattcacgatgaccacgatcgactaagacagccaatgaaattttctttggccggcctaagtccattaaggcgtcaagcgcggcccgaatcgtccgccctgtgtaaagcacatcgtcgattaagatgacatgcttatttgtgatatcgacgggaatatcgctcccgttaatctgtggttcattttgtgtatcaagatcatgttgatcatcgcggtataacgtaatgtctagtgtaccgacgggcaatgcgatgccttctaattgttcgaggcgttctgcaatccgttgggcaataaacacgccacgggttttaatgccgacgaggacgagatctgaaatccccttattctgttcgataatttcgtacgtaatccgagtaaagacccgtttcattgtgttactgtcgaccacttctttgaccatcgtaaagactccttccaaacaaaaaacctctcaaaccgataaggtcgagaggttacagttagagactccgcgtctagtggtgctttcaccgtaccttctcggcctcacgggaccgattttaaaggcttctattaagttagacctagcttaacggagaatccttgatttgtcaatgattttcacgtaattcggttaaagttttctcgaagattgcgggtaatggggcttcaaagcgcatcatttcgcccgtcgttgggtgcttaaagcctaatacagcagcatgtaagaactgaccatgcccagctaaagttttgcggggaccataaacgggatcgccagcaactggccggttaatataggctaagtgaacgcgaatttgatgggtgcgcccagtttctagtcgacatttgattaatgtgaagtcttcaaaccgttccatgaccgtaaaatgcgtgaccgctgggcggccatcttcgacgattgcttgtttcatccggtcgacttttgaacgaccaatgggtgcatcaatggtcccctcgtcttcttcgatgttgccgtggactagcgcgatatattcacgtaagttttccttagctttgagttgggcggataaagattcgtgggcttcgttggttttagccaccatcaaaagaccagaggtatctttatcaattcgatggacaatccccggccggaagacgccgttgatttcagacaatggggtgtgcgccaataaagcgttgaccaatgtcccattcgggtggccagctgatggatgaaccaccatcccttgtggtttattgactacgaggacttgatcgtcttcatagacgatatcgagcggaatatcttctggggttaagtcgagcgtgacagggtctggaatattgacggtgacgacatcccctgttacgactttgcggttactcttacaaggttgatcattgacttgcaccaagtcttttttcaaccattgctggatttgtgaacgtgagtaatcgggtagtaattgggtgagcgccttatcaatccggcctgtttcagttgtaatcgttaattgtttagtttcagtcatgagtcactttctctttcaacaaaatagcaataaagacgcagatgacgcctactgttaaggcaacatccgcaacgttaaagatggggaaattaataaattcgatttggaacatgtctacgacgtacttaaggtggagccgatcgatgaagttaccaagtgttccggctaacagcaacgttaaaccgatccggtaaaatttttcagtgcgatcagaggtataaaataagtagccaattaccccgagggccacaatggtgacgaggtagaaaaaccactgttgaccggccaagatactccacgcagccccatcgttttgaacatacgttaaactcagcacgttcggaataacgggttgggttgctgcaaaggcaacatggacaacaatccagctttttaaaagttggtcaccgagtacaatgactgcggctaaaacgatatagatgagcatgggaacctcctattcatacaatctaccattgtccttaaaatcggctgacttgtcaatcagttttcgagatgggcgttaggatattggaaaacgtgcttttcaagctaactttctgcgcttaaccaaatttgccaaatcgccgattgtatcggcaattcgtcaaattctattaatgctcagaagctaaccgtttcaaacgcactctagaataatccgctaatcaggccatcttctgtgacgtccatgttgagggcggctggtttctttggtagacctggcatggtgaggactgtgccggtcattgcgacgatgaagcctgcgccaagctttggaatcaattcacggacgtgaacggtgaaatcagttggtgcgcctaatgcttttggatcgtctgagagtgaatattgtgttttggcgatacagactggtaagtggtcccagccatttttttcgatttctttcagttggttgatagctttgccctcgaaaacaacctctttaccgccatagatgtcagtgacaattgtggttagtttcgattgaatgtcggcgtttgaatcatataatggttggaagtttttaggttgatcgagtgcttctaagacggcctgggctaaatcaaggccacctttaccaccatgtgcccaaacactagctaaaacggctttgacacccagttcagcacatttttcttggagcattgtaacctctgcttcggtatcacttgtaaactcattgatggcaacgactacgggaatgccgtaacgttgcatattagcaatatgtttggctaagttactaaaccctttgtctaacgcaccgagattttcagtggttaaatcagctaaagcaacaccaccgttgtattttaacgcccgaacagtggcaacaatcacgatggtatcaggagtcttgccaagttgtgggactttgatgtctaggaacttttcagcacctaagtcagcgccgaagccagcttcagtaatcgcaatatcacccatttttagggccgtttgggttgctaaaatactgttacagccgtgggcgatattggcaaatggtccaccgtgaattaaggctggtgtatgttcaagcgtttggacgaggtttggtttgagggcatcttttaaaagcatcgcgattgcaccggtgatttcgagctcgccaactgtgacgggttgtcgatcataagtgtaaccaatgacgatttggctaatgcgccgcttcaagtcagtaatgtcagttgctaagcagagaatggccattaattcgctagcaacggtaatgtcaaaaccatcttggcgcggcatcccttgcactggaccaccaagtccaatgacaacttggcgtaatgcacgatcattaatatcaagcgcccgtttccaaataattcggcggggatcaatgttgagggcatttccctgttgcagatggttatcgattagggcggctaaagtattcacagcagcggtcaatgcgtgcatatcccctgtaaaatgtaagttaatatctgccattggtaccacttgggcatagcccccaccagttgcgccacctttcatccccatgacggggcctagtgaaggttcacgtaaagcaatgacggctgattgatctagttgacgaagagcgtcgccaagaccgacagtcacggttgatttaccttctccagctggtgtgggattgattgaggtcactaagatgagtttgccatcttctttttctttcaatcgattaatggcagcgaaattaaccttcgctttatacggtccatattgttctaaatcagcggccgttaaaccagcttgttcggcaattgccgtgattggctgcatctccttagcttcattttcctgtgctatttgaatatctgacataccgcccagctcctttttatttatgatactacctagtatagctgattacgtacggaattggcagatgggatgcttaaaaagaacgatattcttcgacacacttctttgtacgtggtaaaataagcgcgtacgctgattaacatttcaaggagggattgtgatggaacgaggaatcgttaagtggtttagcaatgctaaaggttatggcttcatcagttatggagatgacgaggaggttttcgtccattttaccgcaatccaaaccgacggctataaatcattgaataaagacgagccggtattatttgagattaaagaaggcgcccgcgggttgcaggcagctaacgtgcaaaagatagcagaataaaaatacgtttaaacgctaaaaaagagccacgacaagattaatgtttgtcgtggctcttttttatttaactattcttcaattggccaaccattttgtttcagttgttcaacgaatgcctgcttggctttgcgactaaggagtatttgttcgggttggtaatcaagttcgttggttttaattaataaaccatgtttttggacaataatggtcgtagtcgtttcacggttgatggttcgattatatttaaataccggccgtttaagcgtgatcacgtctgccgtcattgaaacacgatgcccgaaaatgacccatagcgtcaaccaaacggcaattaagccgatgccccacgattgccagtttaagttgatgagttcaagttgtacaattaaagctaatgtatagacgaagccaatccaagaccaaatcgtcacgaagtaagcataatttggttggtagaatgcggtggttgtcttttgcatgagaacactcctttttacgctttgtatcataccattaacctgaccctgctgtcagtgaaaggcggtaaattttaagaatgattaaactttatacggacgcagcaactcgtggcaatcccggaccaagtgcggcgggaattttaatcgtgacaccagagcgacaatatcaactacaagcacctttgccagaacagtccaatcatgatgcagaatttgcggcggtcattcttggcttagaacaactagccaatcgggggcttaccacgaaaatactacagattaacgttgacagcaagcttgtctttcagagcctagaaaagcggtatgctaaacattatcaagctgccgtcgaccggattctagcacttgaggcgccctattcaatggtcatccaccaatggattccagagcgtcagaatcagggggcgcaccatctggcccaacagggattacctcatttaactgactgttgataggcttaactagcgctttgagcgtgattttagtaaaataataagcaacgctagaattttggaggagtacgatatggttttagttacagaaataatgtcattcatcatcttcattaatgccttattggcaattattacaattttgagacagccccgcgatattgcggccacctgggcgtggctgctagtcttaattttactacccgtgggcggttttatcctatatatgtttaccggacggggcttatcgcggaaaaagattttccaaagtcaatcgcaaatcgatgatgggcttttcgcattggtcgacattcaacgtaaggaaaatcgtaaaaacgacctcttaccgaaaaagatgctttccagtgaagcatccgaaatggtgaatctctttttaaatattaataatgcacccgttttaaagaataaccatgtcaaaatctatactgacgggcaagcaaagtttgacgccctctttgccgacatcaaacaagctcaaaaaagtattcatatcgaatattatacgatctataatgaccgattgggcaatgagttacaacaactattgattcaaaaagccaaagaaggcgtttcagtcaacgttgtctacgatgcttggggctcccaaggcgcaacgcaaaaatggtggcgcgcacttgaagatgtcggtggccacgcgcgaacgttcttcagttcaaaacacacgattaccgattttcgcttgaacttccgtgatcaccgtaagattgtggtaattgacggtaagattggttatattggtggctttaacgttggcgatcaatatctaggccggagtaggaaattcggacattggcgtgatacccatatgcggattaccggcaatgccgtgttagccttacaagtacgctttatgatggactggaacgcgagtgttgagcctgcgattaagttaacttactcggaagaactcttcccagtggaccaatcccaaaatcgtggatcagcagccatgcaaattgtctcaagtggtcccgataaattagatgaacaaatcaaactcggttatctgaagatgattagtaccgctaagaagcgtttatggattcaaacgccctatctagttccggatgatagtattattgatgcgttgacgactgcggcaatgtccggggtggatgttcgtatcatgacgcctaacatgccggatcaccccttcatctaccgtgcaacggaatactacagtcaactcttgcatgcagctggcgttaagatttaccggtatgaagatggattcttacatgctaagacggcggtcatggatgggcatatcagcactgtaggttctgccaatatggatatccgtagtttcaagctgaactttgaagccaatacgtttatttacgatccgaaagttgcagcgcaacttgaagcgatctatcaggctgatatggaaaaagcatccctactaacagacgaaataatcgcccaacagtcaacttggttgaaatttaaacaaaaattttcacggttactttcaccaattttataaaatgttcgttaactcatttttatgatggtgcaatattaaattaaccccaatctaaaaaattttttaaaatctgttaagctttgtccggcgtgcttttgaaaaattttgcgcattagcagggattgactttacccataaatatgtttaacttaagtacaggacgttgcccaagacaatcaaatgaacattcgtaaacgaccactataattagtggtcgttttttgttttatctacaatatgtggtgtttattgattgcatcttccatttcaaaacggtatactatttttatcgataagagaaatacaagggagttaacgattatggcaaatatcacattatatactaagaacggctgcccacaatgccggatgacgaaacactttttagaaacgcacaacgttccttttgttgaacataacatcaatgacgaaccacaatatattgattacttgaaggaacaaggtttccaagccgttcccgttttagaagcggatggcctagaaagcttctcaggttttagaccagcggaattgcaaaaattggcgatttaagcaccatgcattcccagttttaacgggtgaggccgactcttgattactaaagagttggtcttcactttttttaaaccctaaaacagctaatatgactagaaagtggtggcaaggatgtctttaaaagagattaaaaccgaagatgtaacatactatgaattgaataaccaaattaatattccagtgaatggtcaaattccattacaaaaggatcaagaagcactcgatgcctttttggaacaaaacgtacaacccaatatggtgacgtttaaatcacttcaagaccgtctagattatttagtcgcggaaaattattatgaagcagattttttgaaggcttattctctttcattcatggaagaattgaatcaatatttaaaggaccaagacttccacttcaagtcatttatggctgcttataagttctatgcgcaatacgcattaaaaacaaacgacaatggcttttatcttgaagattttaaagatcgcgtttttgtgaatgctctctacttcgcagatggtgatcaaacccttgcgctgcaactagcggatgaaatgatccaccaacgttatcaaccggcaacaccatcgtttttgaatgctgggcgttcacggcgtggtgaattagtttcatgtttcttactccaaacaaccgatgatatgaattcaattggtcggacgattaactcggcacttgaattatcacggattggtggcggggttgggattagcttgtcgaacctccgtggagctggcgatccaatcaaaggcatcgacggtgcagcaagtggtgtcctccctgtcatgaagttattggaggattctttctcatactcaaaccaattaggtcaacggcaaggcgccggcgtggtttatttaaacgccttccatccagatgtgattgctttcttaggtgctaaaaaagaaaatgcagacgaaaaatatcgtttaaagaccctctcattaggcttagtcgtccccgacaagttctatgaattggtgaaagctgatgctgatatgtatttattcagcccttacggtgttgaaaaagaatacggcgtacctttctcatatgttgacatcaccaaagaatatgacaacttaatcgccaacgataacatcaagaaaaccaaaattaaagcccgtgatttagaaaatgaaattagtaaattgcaacaagaatcaggttatccttacatcgtcaatgtggacacagccaatgctgcgaacccaattgatgggaagatcatcatgagtaacctctgttctgaagtcctccaagtgcaaaccccgtcacaaattaataaccgccaagaatatgacgtgttagggacggatatcagttgtaacctgggttcaacgaatattccgaacatgatgacgtcacctgactttggtggttctatcgaagccatggtgcgtgctttaacctacgtcacagatcattctgatattgatgtggtcccttctgtggctcatgggaacgaattggcccacaccattggtttaggtggcatgggtctgcataccttctttgccaagaaccacatgatgtatgggtcagaagaatcaatcgactttaccagtaattatttcatgctcttaaactactggacacttgttgcttcaaataagattgctaaggaacgtcagatgacctttgccaactttgaaaagagtaagtatgctgatggtagttacttcgatcaatacgtcactgaagactgggcccctaagacggacaaagtcaaggcaatcttcaaagacatcatgattcccacaaaagccgattgggaagctttaaaactagccatcatgcaagacggtttataccatcaaaaccgcttagccgttgcaccaaacggttcaatttcatacatcaacgatacttctgccagcttacaaccgattgttaaccggattgaagatcggcaagaaaagaaaattgggacaatctactaccctgccccaggtctttcaaacgacactatgccatattatgaatcagcttatgacattgacatgcgtaaagttatcgacatctacgcagcagcacaaaaacatgtcgaccaagggatgagtatgacgctcttcatgcgttcaacgattccagtaggcctttacgaatggaaaaacggccggactgacaaaatgaccacccgggacttaaacatcttaagaaactacgcccaccacaaagggattaaatcaatctactacatccggacttacacagacgacgaaagtgaagtcggcgcaaacgcatgcgaaagttgtgtaatctagagtgcgtttgaaacggtttgactttgagcattagtctaactcggcgaataactgctataagcagttgtttgacgagtgtaactaagcgcagaagtcagtttcaaaaagcacgtttcaaaacagagtgcgacggcaggcgtttatattttgagcattagcatagggaagcgaattagcgaagtagtcgatgatttgattcactgggctaagcgcagaaagttagcttgaaaagcacgtttcaaagcaaacactaaatctccactccagctgctcgtcagctggcctacatacctaaaaaagaagcacgttaaaaggagttcatgaacatggcagaaaattatattgcaattaactggaaccaagttgaagatcaaattgataaagcaacttgggaaaaattaaccgaacaattttggttagatacgcggattcccctttccaatgacttagatgactggcgcagtttaccagacaacgaaaaatggatcgtcgggcacgtctttggcggcttaaccctacttgatacgctgcaatcacaagatgggatggccagcttaaaagccaatatccgcacccaacatgaagaagccgttttaaacaacattcaattcatggaatccgtgcatgcgaagagttattcatccattttttcaacgttaaacacaccaactgaaattgatgaaatcttcgactggaccaacacaaatgaattcttgcaatacaaagccaacaagattaacgatatctatcaaaacggcacacccttgcaacaaaaaattgccagcgtctttttagaaaccttcctcttttattctggtttctataccccactctattacttagggaacaataagttggccaacgttgctgaaatcattaaattgattatccgtgatgaatcagtccatgggacttacatcggctataagttccaattagccttcaatgaattggataagtcagaacaagaagaattacaaaactggatgtatgatttactgtacgacttatatgccaacgaagaaaaatacacccacgaagtttatgatggcactggttggacagaagaagtattaacttacctccgttataacgccaacaaagccttaatgaacctcggtcaaggcgccctcttcccagatagtgctgaagatgtgaaccccgtgatcttgaatgggatgtcgacttcaactgccaaccacgatttcttctcccaagttgggaatggttatcgcttagggaatgtggaagcgatggaagatagtgattacgactttgattaattaaatgcaatagcgcgccccactaatttaagtgagacgcgctatttttttggttattttttaaattgtttcagatatcgtccggccaataatttatgaaacttaacgcccaacgtcggatttgaggcatcaatatcggcatacatcgccgttgtaatcttgttgagtagtggcactaactggtcgagttctgcctcggtcaaggcgttcacaaacggtggcacctcttgattggcagtttcaatttcttggcgaccggcatccgttaagttaactaaattaacccggcgatcacttgggagcttacttaacgtcaccagctcgcgtttagcgagtttagcgacaaattcactggttgattgaggtgacattcccaaacgcgttgctagttcacgttgcgataagtgatcttcatcagcaagtgccaatagaatcttcccctggccttcgacgattaaatgcgggcgtgcttgtttaacgatatcatcgtagatcttactgagttgttcatattcagctaattttccggcgaccaattcggccttgacactctttgccatacgtcatcttcccttcgctgttttaattagtatacaccattccaaaatctaagagtagcaatccttgacattttaatcaggtgaccttactatataaattaatcatgtgacctgattattaaatgaggaggcaatattatgtgcagtgagcatgtcattgaagtaaacaatattcaaaaagcatttgggaccaaaaaagtggtgcgtttcgtttcgctagccgtttctaaaggtgagattttcgcattattagtgcccaatggtgccgggaaaacaacgctcttaaaaatgatgaccaccctcctacgaccagatagtggcacaatcacattaatggctttgatacgataacacaaagccgccaagtgcgccaacagtttagtgtcaccaatcaaacagcggcaatcgatcaagacttaagtgcgcgcgagaatctccgcttatttgggcggttaaatgggctcagtgccaaagcgagtcgaacccgagctaacgagttactgacggactttgatttggaccaatcagcggatcaaacattggcgactttttcaggtgggatgcggcgacggttggacttagcggtcagcttagttggcaagccaaggatcctctttctcgatgaacctaccactgatctggatccaagagcccagacgcaaatgtggcatgcgattcaaaaatgagtcgcagttgttaatctgattgttccgtgtttaggtaaactagtccctttttttagtctgtgttttgggtggtgtgtgtgtttcaatggaacgattgcaaccagtcataaaaaacattgtgatagatagtaataaaatgaagacaggcattatttttttcatagtgattgttttctccctgatcattgaatttgataaattggatagcgattgtagagtgggtcgtttagattggccgtcgcaacaatggcttgcagtgtgaagtcgcgcggaatgcctactgtgaccatcccatagccaaagtcttggtgtggtttaaactgattatcggcaataaaaatgaagccgtcttcgtccagtttttgataggaattgtgcgctagtgtttgcgtagttgtttgactcaaaaacgttttgagcttatttttcgtattcagttgttcattcggttgatgcgcaatgacgaaaaaggttttaccccgataattataacagttacgcctactttgactagtcttaaatattaagttttatcgaaaaacgataaaaattaattgtttttcaataaaaaacgattataataaaactattcttaaaaacgaggtatcagatgaatgttaaaaaaatggctacttagaatggcattactcggaattgcggcggtatttggtctgttaagtttgttagtgacgatccaaattgtgaccacgaaacacttagaatacccagcgacaatctggatgttggcgattgctgcgtatggtgtgacggcgagtatttggtttgcattaatcaagttggcgcagattctccgcttaattgagcaccatcaagtttttctccctcagacgctacgatatgtatcagcaattagaaaagcgattttggttgcgagtttgacggccctttttgccctcccctttttctaccggattacgcaactcgaagatgcaccaggcttgatgttgctggggttaggcctggtcttcattccgtttgcaatcctcattttgatgcagattgttgaagatctttttaaaagtgcaatcgcctttcaatctgaagtcgatttaacggtctaaggaggaattcaatggccattcgtgtgaatttagacgtaattctcgctcaacggaaaatgagtgtcacggcgcttgctgaacaggtcgatattacgattgcgaacctttcgaatttaaaaaccggtaaagccaaagcaattcgcttttcgacgctcgagaagttatgtcgcgtattagactgccaacctggtgatattttggaatatagcgatgattaatcctgcggcccccttttatcggggaccgcttttttaatgcttcagtacactggttgatgcgatatgtagtataataaatccgtagtgattatgaaaggggttttatgctgatgtattacgttgtgatgaagtcaaatgatattcgccgaaacttggcaaccgaacaatatttaatgaatcaaaaaaatttcgatgaaccactcttactattctacattgagaaaccatgcattatcgtgggccgcaaccaaaatacgtatgaagaaatcaatcaaaaatacgtggaagaccatgatattgcggtcacacgccggttgtctggtggcggtgggatttatcaagatctcggtaacctttgtttcagtttcgtggtgaacgcagattctgaacaattcggtgatttcaaatccttcacgcaaccaatcgtcgatgcactccatcaaatgggcgccacaacggctgaagtttctggtcgcaatgatatgttagtggacggtaaaaaattctcagggaacgcgatgtacaccaagaatggtaaaaccttctcccacggcaccctttcatgggatgttgatttagatgttttgacccaagccttgaatgtccctgcagataagattgcgtcaaaaggcattaaatcgattcgacaacgcgtcacaaacctaaaagggcacgttgaccctgaataccaaaacatgtcgacagaagagttcagagacgtcttattactgaacttgatgcacgccgatcaactagctgatattgccgaccgcgaatatcaattaacggccgcagacgaacaagccatcgataagatttttaacgatctctatagcaattgggactgggtctatggcaagtcacctaaatcaacggttcaaaaacgcaaacacttcgatttcgggacgattgatgcgcgcttgttaatcgaaaatgggaagattgccaacgtcaagttctacggcgacttctttggttccggtgatgctaatcaattggctgaaaaattagtcgggacggtttatgaccgtgaacatttagcaagcactctcgaaccaatcgacaccacgtcctacttcacagggattccaaaaacagaattagttgaattattagcacaataaaaaagagtgtgtgacggaacgcggtgatcccctgagggttaaccgcaaggatatgagttacagaacacgtttggactataaaagttcggctatcaaaaaggagctgagacaaaatttacttttgtctcagctcctttttgattttatgcgatgatttcagttgtgattgtttctgggttaaaagctgtttgaagcactgttttaaccgtttgttcaattaccactaattgagctgatgattgtccgaaagcataaacaacgagcatcgcttctgtcgtttcaggggcaatcattgcgcgtgtggaatccgaaattggactgccaaacgccccctgttgatcgactaaaattgggaagtgactgatgttgatcgcccctttaccaattccggcgtactcgtccccttctgcagcgacttgataactgattgggccgtcgattttagctaagtcgtaactgccaatcggtaattgtaacttcagggatagatagttattcacatcaaccagtgcattaatttgatagagcccctgtcctttaacaacgcgccgtaataagctatccgaagatggtcggtgccgtgttgcatcaagtccgattgccttatacgtttttttcgtcgcgatgatgttgggcaactcacgaatttgttcgagcgataaattcgcttcgatttcgttgagcaacggcgttaaagttgtgtcccagaacgcggcatcttttttagcatttgtgaatgagaatgttgcggtgaccaattgtgcttggtctaagtttgcttgtttagtgattgtcatgtgtgaatcctccaatttgtgtttaatgcacgaaattagcggattgttggcacatcacattcaaataatggggataagagcatgagacaacctcctagggaaatagaatagttattagtataacaattaaggctgaaattgcaaccacgtaaaaagtctcgcacaaaggcgagacaattgactagcgcgctatttttctcaatctaaacgtgattcgtctagtttgcatgaagtgttggcaaatgccagcgatgataagcggtgcaacaatactggtcaaggtgctaatccagaaagttggctgatcgaaggcaattttaatcgccgatacgacattcacttgttcgaaattaacgaagaaataatcggtccaatccggaatcatccgcgtaatgattggtgtgatataacgttcataaatcgtggagataattaaccatgctgcaaataggaaaacccaagctttatgttcaaataaagtaatgaaactactgatcgctaaaccctgggccatgaacgtccatacgacgagaattaatgccacgataatgtgggggtctaacaggttagctttaatacccgcgaatatttggttatgaatcgcgattggatataaacaagcaaaggtgaccagttgactgctgaataaactgattaattgtgttaggaagctaatctttctcggaatcccattcaaaatggcaaaattaaaagtttttcgagtggttgtaaaagattgaacgactaatgtgatttgactcaggaataagaaacctgtcacaattgcaaggccaaaatcacctaagtctaaattctttgagaaaattaaagcaacgacaaccatcccgccgaaaaatccgatggcaccccccgccagtgttttccaaatggcggtcaggcggtaccgcatcattgcattaaacatgtgcttcacttcctttgttcgttaatttaatgaaagtttcttgtagatcgatatggtcaatcgttagacgatctggaataacccgttcttctggtaagacgtcataaagataaaccgtgtataaggtccccatttgctgggaatctaagacgtttaagtcggtacagtactcgcgaacaagttcttccgggccactgacacggtaactcttggcgaggacggtttccaaatcatcatcgacaattaattgagcgtcgttcaagaccaagacgtgttcgactaaggtcgcaatttcttcgatgatatgggtcgcaacgacaaatgtccgtggccgactttcataggcctgtaaaatgtagcggtataagaggctgcggtagttagcatctaagcctaagactggttcatcgaggaaaacatattccgccggcacacaaagcgcaacaattgttttaaaaatcgtgcggtacccagttgaaagctgattgagtttcttttttggattcaaatcaaatgcagtcagcatttctttggcgagtgcatgatcaaatgaaccttgcagtaaggcggtatttttaataatggtccgcaatttgtcatctttattaaagagattgatttccgacatcaagtaaattgtttgtaacggatgatcgcgaccggttaagaccgtatcgccccatttaatctcacctagggatgcagtttgatgattggctagaatacttaataaggtactcttacccaccccattgcggccgagtaagccgtaaattgtattgggtttaagtgttaagttgatgtcgtcgaggacgacctgtttcccaaattgtttaatcagttgtgtggtttgtaaattaggcatggtcataacccctttcaatcagtgcaattaggtcgtctttggttaggtttaattgttgtgcttcagtgataaattgggcaacatagtgttcaaaaaattcagattgccgtttttcagtgatctgtgcgggtgcgcttgatgtgacgaacatgccgagtccccttttcttttcgattaagccgctggtaacgagttgattcatccctttgagtaccgtggctggattgatattgaattgtctggaaatttcagttgtcgatgggacttgactaccaggtggaaagaccccagtaaaaataccctcttcaatttgttcggcaatctgccggtagagtggtgcatcattattaaattcaaaaagcatccggaacacctccgtttcgttaattggttagttacttatgtagttaactataatacgtaggctgcgaaatgtaaaccgctcctcaaaaacatttgattattcgttcatattcacctattatgtacttataatcaaatgttttcagagaggatgagaacgatgcagacagcctattgtttcattgatttagcggatagccgcacccgttttacggaacaagcacagacactccagttattgcaacacttcgccgacacgttgaatcaccattttccagcgttattaacaccatttgcaattaaggatggtgatggtctattgggcggtttttcagcggatgaccaggcacagattgttgatgtctatcccttttgtaatgcctatttaaagagtgacgcttttcaaactttctggcagacacattttgcggggctggcggagcccactttttattttggggttggcttaggaacgatgactacgccgagtccaagtgactatcaggatatcaatcgggtcaacgggacagcaattgtgaacgccctcgccgcagcagatcaagccaaactgttgcgtcaaggtgctgaattagcacaaggttatccctttatgacgacggcctttcaatttcaattagtggcagatcaaccagccgcaaatgggattaatgccctcttttatttaatttatgagcaactcttgaatacgcagttgcgcaaggacgcttttgctgaaatcgtgcttcaaccaacattgaaacgctatgaattagcggaattgttgtggaccaaatacggcgttgcttcctatgaactagactacagtgatcaaaaagggcgtgcattagcctctagtaaagtcagtcgcttactgaatcagattcagtatcccttgattgaacagaccctggcaacgttgcgcgcgcaactgatgacctttaaggaggcaatcgaatgaacctctttgcgcttttcttgcttagtcatattggctgcgactttgtctttcaatctgatcagatggcccaatgcaaacgttcaacgaaactcggtgtgaaatggtggccattatgcaagcacgcactgacacaagtcccgttagtgcttattttatggggtggcggttggttaatggcaccacctacttggccacattggcaaccgttactaatcggattagtcatcattgtgatgagtcattggctcattgatctatttaagcaaaatagccaaccacttttaaaagcacagctacatttaaccagcaatcgcgtaccagtgatgagttataccatcgatcaagcactccatttaatagtgatcggccttgtgagcatgttcctcggccagcaatgggcgtttaaccatgtgaaccgattattattggcggccagtattgttttgagcacgttattatttgccgattatttcattagcttctatttaaaaggactggatttaaacatggatcgcctgccagatggtgcaaaactgggtcggcatattggtcatttagaacggtttgccatcttaatcttgttttacacgcacaatgttgcgagtattgctgtgattgtggcgattaaggcgctgacccgctttaaagccattgaatccaacgaacaccacttcgccgaatattatctcattgggagtttgctcagtctgatcttcggctgtcttggcggttatctattaagtcttattgcccattaaaaaaatgccgcagaatcaggaaaaatcctgttctgcggcactttttatattattcagcgatgattaataatgatttaatcgctttgcgttgatccattgcttcataagcggcttgaatatcatctaaggtaaagcgttgtgtaaagactttaccaggattaatggcaccctttaaaacagcatccaataaacgagcgcgatcatgagtcgttacggcagcaattcccccacgcaaaccgatgttcttccggaataaggcattggtgttcatctctgctttttggggaatgccgacacgaccaatgacagcccctgcgccagcaacggcgacggcagtggtgacggattgttcggtcccgacacattctaagacggcgttggccccagcgttatcggttaacgccatcacttttgcgaccccttcgtcaccgcgttcagcaacaatgtctgttgcgccgaattcaagggctaatttttgccggtccgcatgacgactcatcgcgataatccgtttcgcaccgagtaatttggcgccaatcacaccacataaaccaacggcgccatcacctatgacaacgactgtgtcaccgggtttcacttcagcggacacggcagcgtgatagccggttgccatgacgtctgaaagcgtcaatagattattcagcatttcatcagagtaatcgcttggttggccaggaactttaacgaggccccagtttgcattgtgataacggagatattcggcttggtagccaccaggattattctcgcggttggtacaatcgccatcaaaaccgtttaaacaagcggcacagtggccacaaccatgggtaaatggcacgatcacaaaatcaccgacactaacattttgtacgtcagtcccaacagcatcaacgatgccaattgcttcgtgaccggtgaaaccgcctacttctcgttttgaaatcccacgataccaccataaatcagaaccacagacgcacgcgcggataatgcgcacgaccgcatcggttggcttttcaatcgttggttttggtgcttcggtaatggtcatttgaccaggacccataaaagtagctgttttcataactataatctcctatctcttcctattatattgtctttactatacaccttagacctcactttaatgcaagctttttttaaagtccaatcgccagttgttgtttcttgcttaacacttcatcttgggtaatcccaatataatggagcgtcgtttcttgcgttgaatgaccaaaatcaatcatcaatgaccgcacgtccccgaattgtttgtagaaccagtagccgtaagttttgcgcatcgtatgggtaccaatatcattacgcccaagtttcttacctgcttcagtcaacatgcggtaaacaccgttgacggtgatgtggttatcgccgacgcggctaggaaacaaccaatcattgcctagcaattcattattttgaatatagggactgatgtatgggcgtaaactcgccaaactaatttggcgccacttacccgttttttgttcaacaatcacgggattgtcttcgatcacatctctgacttttaactgcacaatatcagaacagcgtaagccagtattaatgccgagtaaaaataataaataattgcgactacccatttgtgaatggcgcaagatgactttcatgtcttcaatctcatcttttgtccgtaaaggttgaacatttaattttttgccttttttagtgcgcgatttccgcatgttttttccgcctttttgaccgcattctttttctctatatcattataaaccatgcggtggtattttgcacctttgattatcgttgatttaaagggattccgagcgcattctttctaccaaaagaatgcgctcaaacacattaaaggctattgatggctaaatcacggtctaatcacgtttataaacgatcaatcaccagaggcgcattttaaggacgtttcagattagtgagtggacaagtggtcgcgaaacttgcttaaaatgcgaattcaaaaaggccccttaaagtcacaaaaaaaacagcgttaagacaaaaagtcctaacgctgtttttttaatagccggctgacaagtctaccggattgacgggtaattcacctttgtctaaataactgggtaaattttgatcgaaaattttgaagagccgttcatggatatcagcgatgtaacctgaaatatgtggcgtgataatcaggtttggtgtggcccataatggtgaatcacttggtaatggttcgttttgggcaacatcgattgctgctcctgccaaatgaccggattgtagatagtgcatcaaagctgcttcgtcgactgaagcgccgcgccctaaattgaagaagtaagcccctcgatggagttgcgtaaaaaaggtggtgtcgaagaaccgattggtgaccagtgttaatggcatcacattaatcacgaagtctgcttgtggcaatgcttgttcgtaatccgtgtcggttagaatctgatcaaaattggcaacgggtttcccgtgccgattaacgccgattgtgtgcatccccatgacgtgggcatactttgcaatttcctcaccaatttgacctgttccaaaaatgaggagtgtgcggtgttccaaatttgtcatttgttcaccaatagcatgatgctcccattgatgcgctgcttgtgcgggtaagctctgataaatcccacgggtaaagtgtaatatgtaacttaatgccgtctgtgcgattggttttgcgtgcatcccgcgtgcgtttgataccagtaccccttgcttagctaacgtggctagtggtaaataatcaacccctgagcttgcggtctgaatccattttaattgattaccgggctctgctaaaattttcgggcctacatctttattccaaccaaacataatctcaatactacccagttgacttggttttaaatcagctaaagcgatgattgttaaatcttttgcagttagtgctttgacgtgttgttcaggaattgtttctgctgctaaaatgactgtcaagtcgatccctcaccttattattgaagtaatctttattataagggattttcagcaaataaaaaagcattaccgactgaaaacggcaatgctttataaaaaattttattctttttctgcacgtggccatactggacgaccccagtattggaataaatcagtttgaatccgaccattatacaatttccggcgtttagttgcgcgttgcccgaatgattcttggaattgtaagtcacttgttaaaatatacttactccaagtcttcaatgaccgataggtatcacccatttctttatacaaagcacgggcttgtgtttggtcgcttaatcgtttcccgtaaggagggttggcgatgatgaccccgttggttaaatctgtcttgaaatctttaacagcgagttgtttgaactggatatcatgtaaaacaccagcttcgtttgcattcaacttagcgatatcaatcatgttttgatcgatatcataaccaaaaatttcaagtggttggtctttttcggctgctttcgcttcggctttggcattttctaaaacagaagcatcgatccaatcgaagtcttcaaaggcaaacttacgatgcataccaggtgcaatgttgtgaccaattaaagctgcttcgatcgcaatggtcccagaaccagtcgttggatcaacaaatggcatatcaggttgccaacggcttaaaagaattaaggatgccgcgaagttttccttcaatggggcttcccctttttcaaggcggtagccccgcttgaataaactaggaccagttgtatctaagctgatcgtcacgacatcttttaggatgctgacttcaagcggatacgttgcgcctgtttcagctaaacgtgttcggcggtgatagacagtacttaacttatcaacaatcgcttttttagtgatggcttgcacgtctggttcgctatggagcgttgaacggactgagcgaccagcaactggaaaagcggcgtctaatggcaggaacttgtcccatggcaaagctttcacttgttcaaaaaggtcatcgaaggttttggcctcaaattgaccaatcgcgattttcacccgatcagcactgcgtaaccagagattggtttttgcaatatctgccacatcgccttcgaaatacactcggccattatctgaacgtgtttcataaccgagattttgtaattctttggccgtaatggattcaatcccactcgccattgttgcgtatagttggtaagtcatgtttttaaagatccccttaggaaattattttttaaataaaaagagcttgggcaaaagcccaagccacctgattgtaaacctttataggccatgttttgttccagaacttccccaggaagaaagttccttcagtaatcatctatctgttcttacgaactctcatttttagttcatttccataaatgagacgcccctaccaaagtttgggttactcgctcgcggggtttacctcgttccaccgtccaagtttccaaggacgctccgtcactgtggcactatttaaggatattcacgcatgaccgaagttttagcgctttttccgccgttaccgttaaggtaccctggcttattgggccaggcacgaacactacaagcatctcagcctgtgcgggcatggaccttcctcagcctaccgatgtagaccgcgattactcaagatttacaaatgttgaatcaacgtttataagtatagcacatgattaaagatttgtctcgtcaaattgtgaatgattttgaactcttgtctgtggcgcttgattttgttcacttaacttagcaccgaacacgtggcgttcaaggtttgataagcgtttcaaaatatcatagttggttgctactgaagattgttgtggtgcactttccttcacgttatcagaagcgctgagttggcggtttaattcgtcaaccttcttgaataagcgggcattttccgccgttagccgatcgattgcttcttgataagtttgatagtctttaataactaaatcaaggtaaccatcgacttcttcaggttcatagccccgcatttttgttttaaattcttttttcaatatatcagttgggttcaattcgatttcaatttgattgtccattttgacacctcatttagaataaatgtactatgattcccattatagcaaagttatcggataattaaaactcttgctgatctaattccgctaactcagtcgcgatatcttgtagttcgaaaaaatcgaccaagttaatcggataatcttgttggtcttgatattggcgggctgcatgataatcatattctggtttgcccggtgattcacgatcatagtataatagttgaccatccgtatgggtcagcatgaattgttgatactggcgcaattgttgcggtccagaatacggtgcgttaatcactggttcgcaaaaatcgactcgcgctttgagctgactcaattgagcttggttattttcgttccattgttgaccaaaatcattaaacggcaacatcatcgccaattttaaatccggatagtccgtttttagttcaatagcaacttgcagactccactgttcaatccccatttggccaccagtgatcacccactcgagcccatcatctaaatattgtgttaactgcttttttaaggaatatttaattactttaagtttctcgtcagtttcgccaaaaacaccgagttcatagcttcgatagccgctcacccatagtcgtttcaagtcaggtccctcccaaatgattttcaattaaactaaacattgctataatagtgaaacaggagtgtgattttcaatggcctttcattatcctaacggacagccttatacaaataatgagacaaaaccaactaaaaagcaagcccggcaaccagaagcaacaacgttatttggtaaacgcggcatgacgttggaagaagaactcaatgatagtaatcagtattatcgattacatgcaacggctgtcgtgtataagaaaccaacgccaattcagattgtgaaggtcgactaccctgcccgcagccaagcggttattaaagaagcttattttaaacaagcctcaacaactgactataatgggatttatcagggccgttacgtcgattttgaagcgaaggaaacgaagaataaaaccgcgtttccgtttcggaacttccatcaacatcagattgaacatttcagagcctgcttgaatcaaggtggcatctgctttgtcattatgaaatttgtcccgctacaacggctattcttgtatcccgcaacagaactgattagccgctgggacgcgcaagttgatggtgcacgaaaatcgatttcactcagtgatgtgattgacaatgggattgagattaagtaccaacttaatccaattattccctacttagatgccgtagatcagttattaaagcggtcaaataaaggagtttaaagaacaatgtccgataatcgaaacaataataattcgcgagttgcaaggcacaaagctgaagcaaaacccgctaataagaaacgccggcccctctttttaagaattctaaaatggctgttactactgattgtagtggctttcgtggctgggattggtttgtttgcctactatgttaaagatacaccaaacctaacgcaagcggacctgcaaagtccgaatgcgacaattctatacgatgatcaagggaaacctttcaaaacaattggtggcgaaaatcggagttatgtcaagagtgatcaaatcccgcaaacattaaaagatgcagtagtctctattgaagatcgtcgtttctataaagaaaaattcgggattgatccaatccgaattgcgtctgctgcagtcgccaatattactggtaaatcaccgctgggcttacaaggtgggagtactttaacccaacaattgattaaactgtctaaattctcaacgaaaaacagcgatcagactttcagacgaaaagcacaagaagcgtggcttgccgttcaagtcgaacgtcaatattcaaaagaccaaatcttagagtattatatgaacaaagtgtacctgaataacggggtcaatggtatggggacggctgctaagtattattatggcaagtcgttgaaggaattaagtttgccacaactggcattgattgcgggtatgccgcaatcgccaagtaattacgatccgtacctccaccctgatttagcgaagaagcgccgtgatttagttcttgatgcgcttttgcggaacaataagattacagcaactgaagctgccgaagctaaacaagtcccaattaataccggcttagtggatcaacaaacagtagcgaatagttcaacggattctaaagcaaccgacgcttacgtcaaggaagtcctcgccgacttgaagaaaaaaggctatgatccgtacacggctggtttgaaagtctacaccaatatcaatatggacgcgcaacgtaagttatacgatatcgtcaataatgatagcagtattccattcccagatgatcagctacaaacagcagtttcaattacagatcctaataacggtcgaattgttgcgatgattggtggtcgtaaaactggtgatgtgcagctcggttataaccgggccgtgcaatctggccgaagtaatgggtcatcaatgaaaccattaatggattacggtccagctatcgaatatcttgactactcaaccgcacagaaactacaagatgtcccttacacttatcctggaaccaatattcaattgcataactttgatggccgttatctcggtacaattaccgcgcgtaatgcgcttgccaactcacgaaacgtcccagccatcgaactgttagaagctgttggcatgactaaagcccgtgaattcgtgaaaggcttaggcattaacgtgccagctgatactggtctttcttatgggattggtgggaatgtttcaactgttgatgaagctgccgcatatggcgccttcgcaaacggtggaacttactatgcaccaacttatatccataaagtcgaaacagccgatgggattacgcataattatgattctgatggcacacaggctatgaagagttcaacggcctacatgattactgatatgttaaaagatgttattaaaaatggttctgggacgttagcccaaattccagggcttcatcaagctggtaagactgggacaaccgattattctagcgaagaaattgccaaatctgggttaaacccaactttagcgaaggatagctggtttgccggttataccaagaactattcagtgacggtttggactggatacgatgaaccacttaaaaatggattaacaatgggtgagcggaacgtcgccgcttatatctataaagcaatgatggcctacctcgctcaaaacgcaaccaactcagattggtcaatgccaagtaacgtggttgctaaaaacgtggctggcgtacgagaactctatattaaagggacgacgaccattccaagttcttcaagcagtcgatcttcttcaagtagtgtactctactctagctcagaagcaccggtcagctcaagcagtgaaatttctagctcaagtagcgtggttgaaacaccaagtgaatcttccagtgtgccggagacctcatcttcaagcaccccaactgaaagttcacaatcgcaaccttcgacctcaacccctccggcaacaactaatccaggaacggggtcgacgacacaaacaccagcagcgccaactaactaaaagaagcaccgttcagttcaacgataaacgttggctgaacggtgctttttttgcgttttttaaccacgatcttcaagaaattgttggcctgcttggcaaatccttaataagggacactcatcgcaatgcggcttacgtgccgtacagactcgccgcccaaaaagaatgagtgtgtggtgcgcttgaacccatgttttcttaggaagcttcgcttgaaagtccttttcaatctggatcaccgaggcatcctgtgcactgattttgagccgtttggcaatccgagtgacatgcgtatcgacggcaaatgatgggacgttaaaggcgtcacctaaaacgacattcgcggtcttacggccaacaccagcaagttgttccaattcggcatgtgtgcgcggcacttccccaccaaaatctgccattagttgctggcagcatgttttaatgtgtttagctttattatgatataacccgattgaatgaatatcagcttcaatatcggcaatctctgcattcgcgaaactagctggtgtcgggaaatcagcaaatagttgtggggtgaccttattgacggaaacgtcggtggcttgtgcgctaagcatcaccgcaatcaacaattgaaacggtgaatcagcaactaatgcgccctgcgcatctggaattaatttgtatagttggtgcatggcccactgtgttttggcttttgataacatccgcttcatctcctattcgattaacgtcttggatgggccttttggtaagcttgtagggattctttatcagtaatattttgtttctgccagttgagcaaaatcttatcaacatacttcaaggaatagacttgatttaaaacggcttctcgcacggctaattgaatcaattctggttgataatgatctaaatctaaccagttggcaacaatctcagattccaatggcgataatgggcggccaagagcttgttcaacttggttaaagaccgcactccgttggttaccgtctagtgcttgttgagtgacttgtgcgtcttgaacggctagcacgctcaatttagttaaggctggtgtgagatcgtaatggtcttcagcctgaccttgttcattgacagatgatttaagggtaattagttttttctgtaaaagttgatgaatcaatgcgtaaatttggctggattcaattcccatgcgttcaccaatcacagctaaatcgggaaagtcattgttttgactggcaaaatcactgagctgtaagtaaaccactaattcttcagaagacatcttgagcgtttgatagtgatgcagtaacagtcgagagacactcaattggccgccttgtaaaaacgcggtaagttcgttcatattctagccttcttttctaaaagtttcattagttctattgtaaccaattttagacaaataaaaaagcgccgagaacctgatttcggttcacggcgctttagttaatcctcaaagccaactcgtttgagtcagcactctgatttgaaacatgcttttgaaagtagtcctcggtgctttgctacgtccagcaaacgatcgacttgcgtcgctcattcactagactagacaaatgctcgagaactaaccactttcaacgcactctaattcaaacgtgcttttgtagctaggttcctgcgcttaacaatgattgtcaaataatcgattgcatcgattattcgccaaccaacgttaatgctcagaacctaaccagctacaacgcactctatttgaaacgtgcttcttcgaactgccttttccggttaactgtaaaacgggcaccatggatgtgaagcgccataatgcccgttttgctgttaatcctcaaagtcaactcgttcgagtcagtactctttatggtttgattctgttaatcattcttgggaatggaattgtttcacgtaaatgatcgataccacagatccatgtaatggcccgttctagacctaatccgaaaccagaatgtggcactgatccgtaacgacgtaagtctaagtaccattgatattcttcaaggtctaagcccattgctttaatttcagcttctaatttatcaaagtcagtttcacgttcactaccaccgataatttcaccataaccttctggtgccaataaatcagcacataagtaaacatcatcacgtgttggatgtggcttcatatagaaaggtttgatggcttttggataattcaaaatgaagactggttgttcaaattgatccgataaataagtttcatctggtgcgccaaaatcatcgccccatttaatatcgaagtcagctgcttgtaacatttcaacagccttatcgtatgaaatacgtggatacggtgttttagtatatttcttcaattggtcaacatcacggtccaataattttaattcataggcacagtgatcaatgacgttttgaacaaggtaagccacgtatttttcttggacttcaagactttcatcttgagttgtgaaggccatttctggttcaatcatccagaactcagtcaaatgacgacgagttttggatttttcagcacggaaaacagggccaaaagtgaagactttaccaaaggccattgcgccagcttcagcgtataactgaccactttgtgttaaataagcatcgttgtcgaaatattcgatgtggaataattcagttgtcccttcaggggcactacccgtcaagattggtggatccatcttgatgaagccttcttggttaaagaattcataagaagcgcggatgatttcatttctgattttcatgatcgcaaatgggcgttttgaacgtaaccataagtgacggtgatctaataagaattcaatcccatgttctttaggtgtaattgggtattcgctgctgtcaccaattaattcgatgtcagaaatttcaatttcataaccaaagtgtgaacgagtatcttcatgaatgacccctgtcacccacatacttgattcttgtttgacatcttttgccaattggaaaacggcttcgcttacttggcttttaacgacaaccccttggaaaaaggcagtgccatcacgtaattggaggaatgaaatcttcccacttgagcgtttgtcggttaaccaaacgccaattttaacttcttcatcgacatggttttttgcatcgataatactgatttttttaaccataaactctgtctccttatgtgcaacatttaatttacaacagttcaaaataactgatagttattattatataacaaaaccctgacaaccacagccccctaattgagaaccctagatattttcaatcaattgaatcgtcttcccggttttaaaatcgagggttaaataacaaagacggcctttgtcacttttatagacaacttcccaaacaggcttgttgcggtacataccgaagttaatgttcagtactttttgcggatttttagttgaccatgtcttttctaacgcatcgtttttagaaataccaccactttgacgatagacagtggcatgattgcctttttcgttgattaaaacgaagatgccgtgattatcacggtctttaccactaacggtataatatgttgcatttcgatgatacgtgtagaacccatcaggctcttttaatttcgcgtattttttagcaatgttaacggctttggtttcagccgttgcttcgggttttcgagcttgatgataaatcatcagcatgctgccaatgattaccaacaataagaatatccagagccatctcttatatttgcgcacgctgcattctctccttgttcgcttgaataagccttattatagcaaaaaataacggctatcggcgcttaaaaccgaatcttagtgggaatttaaccaaaacaagtcggttaatttccggattattttaaccgacgctgctttttggggcaaacttgtcggtaacgcgcggcgcatttgttgcccatattgggtcgataataaccggggatctaaacaaatgaagacgccgcgatcgttaggggttctgattaagcgcccaaatgcttggcgtagtttaatcgttgctttgggtaaagcctctgctttaaatggattaattccttgggcagaaagttgagcgtaacgaattcgtgtctgcagtgcattcggcgcatcaaatggtaattgaacaagcaccactaattccagtgctgattccggaaaatcaacaccagcaatgaaactgcttgtcgccaacaagattgaatcgtgccccagcataaagcgcttggtaattttctccgcactacccgtaatcccttgggcaagaatctcacgatcaagcgataaaccggcgcggccaagcgcataatacacttgttctaacgcctgattagaattaaagaggactaacgcctgatgcggattgccaactaataacgttaatagctgttcagcaactgcatgatggtactcattgggggctaaattcttttgactaggaccatcttcagcgataaaaaagcgcgcctgttgcttgaagcggaatggactgcgtaatttcttagtcgctagtggttgcgcttcggtaaaaccaagttcacgtttcaaataatcgaagtgcccattaaccgcaagggttgcgccagtcaaggtgactggttcaaagtgcgcgaggatctgttgcatttgcggaccagctgaaagcaattgccactggagcttaaactgtggtaactgactaggttgtttaggctgtgtcatctgaatcattaacgcgtgttgttcctgcggtttcgtcgcaatgaataattgctcaaaccgttgataggcttcaacatccgccaacaataggttgatttcgttttcaaatgactgccaaatccccaaatccccctctgtatattgttctaaccgctgttcaagccagtaacgcaacgcgagaaaatgatcttgaatggtcaacagttggcggttcagttggtcgaattgattatgacaagcggtgacaaattgaaccacttcatctggattcaaataacgttcactaaacgcttgatgcgcttctggttgcggtagttcaaacgctgtggttaggtatgtctctaagtcactgatggttcggcctaacttggttaagtttttatgcactaaccgtaacgagcgggcttgcggtgattttttcgggaaaagccgggctaaattattattggcctgttccggatccgtatattgcaaccctttttgagaccaaagttgccaacgtgaaagtgaccaatcttgttgcgcaattttttgaacattgaaaatcatattttgtgcttcatctaagaccaagtatggtcgcgcaccccaggtttggtgatcattcgcgtgctctgccaggtaggcgtggttggtgacgagtaattcggcttgttgctggcgcttatgcaggcggcgtaagaaatcatcttgataaaacggcgcttgtggttgcagacttgttagtccccggtgttgcacgttattgaaaaatggtgtttggtaactcgttaaattgagttcatccaaatcccccgttgttgtttgggttagccaaactaagattttcatctgaagcaaccgcaccatccgattcttatgtggtaaacggagcgataattcaaagcgatgcaaatccaaatagtgacgcggactcttaacgatttcggcattaatttggcgacctactaatttttcaagaagcggtctggcctgcgttaaaatctgatcctgtagcagcgttgtcgatgttgcaaccactaatttgtgttcaggcgtcatacgataactataggggagtaaatacccgatggtcttccctaacccggtggctgcttcaattaatagtggttcaggtgcctcagattcgaaattatcgtgaatcatatccatcatggcagcttgcgctttacgccatttcaagtggggttttaataatcgttttttatcagcttcttccactggataatcagccgcaaaattagatcccggatagattttaaatgattcctcggctggttttcgtagggcaatgttttcacgaattaagagatcgttcggcagcggtctcgattgcgcatgcatctgctcggcaatcgctgtgaagaaatcccctgtttgacgtaacaagcccgcgcctaacgcactaagacgttctagggtaactaatggcagggtcttcagccgtgccattaattttaagaataatttagccgttaccaaggcatcgctgtcagcttgatgaggattgtcatgttcgatggcgagtaactgtgtgaggtcttgtaatcgatagctcggtgcttccggcaatacgatctgagccagttcaacagtatcgatgcccggcaaatcaagtggcggttgccccacgcgttctaattcgccatttaaaaaaggtaagtcaaagttaatattatgggccacgaaaacagtaccggataagagttcaactaacgttggcgctaaatcttcgaaaatcggtgctaattcgagttgatcagcagtgatatgcgtcaaatgttgaattttagtcggtacgtcgcgaagcggattaacatcttgcgaaatcgtctgaatgattttgccgttttgaatgagggcgcatccgaattgaataatgcggtccccttctttaatgtttgtgccagtcgtttctaaatcaacgacggcataaattgtctcttggttcatgctgtcaccaatactttactcattattatatcaatcatactatgaatgacgcgtagaaaccagtctagttaatagcgactagttggccaatcgacaatagatagagatatttagcggttaccggccggttagcaatttgcgtcaacgcggcactgtataggttaatttggccggtataccgcgctttaatcgcctcaatggcagcttctggatcagctaggttcacaaaatcagtcttatagtcgaacaaaatacagtcggtatccgtggttacataaccatccataatcccatggattaagacattgtcttgatcttctgggcgtaaaccggcgaataaggatgcagccggtaacaatagtgaaaatgggacttcccgatgaacttgcgctggttcagctaacagttgctgacccaactcgctctcgaagaatgtcatgatagcagcaactttaatttgttgtgcaacattggcagtgaggcttttttgtaaaacaagtcggtcgatgacactttgcacccgatcgatcgttactggttgggttaaatcgatttcttgtaagaccagatgcgtcgccgttccaatttcagccggactcgcttttcgaacagtctgcatgaattgtggttgaggtagttcatcggtcacgtaacgatgggtttgttgcggtgtatcagcgtcaaagcgtaattgccccaactgatcattgtcgggatcttcaaagagccgtttcacttctgaaacagactggtaagctgtcgtttcggtggcgccttttgctggataactgaatgttagctggtcttgaatcccgttggctaaatcagttgttaaatcgaccgccttgagtgccacttgttgttgctggctccaatcttgatcatggtgtaaagcacctggtaattcgccaaggcgcgtttcacttgtaaacgttaaattaaattcagttgcgtcatcgctcagaggtaggaatggtgtcccctcttcggtccaatcacgggcttgcggatgacgaattaagctcaatccaatccaatctagtaagttcgtgctagcttgacgaacagaagcgtccaaccgcagatcaggattttgctgtcctttttgccaagttgcaaatagtttcgcttggttatcacaactgcccgcgataatcagccgttgctcggcacgcgttaaagcaacatagagttttcgcatttcttcagcgcgtaacttttgccgtttttgggtcgtgatggttaattctggtagtgttggaatctttaaccgttttttcgcgtctaagtaaacaattccgagtcccgattgatcatcgagcacgtaattttggcgcaagtcttgctcgttaaattgatgattggcatccattagaaagaccaccgggaattctaagcctttactcccatgaatcgtcatcacagagatggcatcttgattggcgagactggttggttgggctaaatccttatcttgtttttgcaaacgttcgataaattggatgaactggaagagccctttaaagccgtttgcttcgtaagtcgcagcgcgttcatagagtgcgtgcaagtttgcttggcgttggcgacctgctggcatcccaccggcgtaatctaaaaagccggtcttttggtaaattgtccagattaaatcaacgagtggccgttgacgtgcaatggctcgtaactcatttaataaggtttggaaatgcgttaatttttcgaagacttgttggccgagttggccggatttttgtgcttcgaactgatcaagataattaaaaacggcttggtaatagtcatccgttttatcattaatccggattaatgcgagttcattttcgttcataccgacaattggtgaccgaagcacgctaaccagtggaatatcttgattgggattatcaataattttcaagaaagatagcatgatttgaatttccgttgtttggaaataattctgcgcatcactaatgacaatcggtaagccgaaccgttggaaataatcaagaatgattaggttgttgttgcgcgttggcgtcaataagacaatatcttgatagcgaattggccggatttcttgcgtatcccgatcccagatggtttcttgattatcaatcattcgtttaattcgctgtgcaactgatgcaatctgaccttcagctttatcaagcttgcccgttgattcttcatcagtcggttttgtttcgtataaaagtaattcagttggctgagttggttgatcgtcaggataataagtcgcaccatattgcaattcagcgttgtgatcgtaatctagctgccctaattggcggtccatgatttgtttaaagactaagttgacgaaatcatcgatattacgccgtgaacggaagttttctgcgagaataatgcgttcactatcgttatctggcttggcgaattcgtcgtacttaccgaggaacaaactcggatcagctaatcgaaaggcatagatggattgtttaacatcccccaccatgaagacgttgcggggtgcttgactagcgatagtttgaatgattgtttcttgtaactggtttgtatcttgatattcatcaaccaggatttcactgaatttattttgatagaacgttcgtgctgcctctgattccggagtgtcaccggccaaaatatccaaacagaaatgttctaaatcgccaaaatctagtaaatagcggcgtttcttctcagcttggaaggcttgcttaaaatcgcgggtaaccgtcactaacttaccgactaactcaccagcgcgccgttgaatctgactggtttgtgcttcgtcaaagacaaaataggttgttaaaagatcgtttagtgcccctttgacattatcgagggcgtttttgatccggtccttgtcatattgttcatcgggttctaatttcttagttcgtttggcgggtcccaattgggcgtcggtcaattgtgtgcgccactgcgcccaacttaaagtggccgcgttggcttgaatggcagttagtgctgcttgtgccgttgcgatagttggcaagtataccgcaaatttctcgtttgtttgacttagttcgttggcgagtgccaagtcttttaaacaggttgccaaggtcgcttctaactttggcagaatcgttgttttgaaataagcactggttgttaggccagtctctggtacctcgtaaggggcggttagagattgtaaccattcatcgggcgttggattggcaccagagaagttaaacagttcgaaaacaatgttggttagcccatcatcgttgcgatcgttcgaaaaattttgcgctaaatcataaaataaggcgtcgtttgactggtaatgttcttcgcgaacgcgttgccaaacttgatcctctaataagagacgttccgcagtatcacttaataaccgaaacgtgggatctaacttaatcacgtagtagaaatgtttaatgacttgtaagcaaaacgcatgcaacgtgctgatttgtgcggtcgggactaggctgagttgctgccgtaagcgttgttgcaccgctttgtcggttgcctcgcttgctttttttcgcagtgccgtttgaatccgttggcgcatttcggatgcggcggcttcggtaaacgtcaccaccaatagtgaatccacatcagtgccattcaagattttttgaatcacgcgttcaactaaaacggttgtcttcccggagcccgccgaggcagaaacgaggatatcatgccccgcgtgatcaacggctgcttgttgggttggtgtaaatcggcgatcactcatgtcgttcttcctccgagttcataattttggctaagacggcttgattatcaagcgcacttaattggcgataattattttctggtaacatcgcatcgaattggaaaatcgatttatatggcgacattgtgagtgcattcgtgcggtcgggtcgcataatcggattcaaagcatttttgccagcaaaaatcgcttcccccgctgctttgattagttgatcgttatgggcaattaattgctgtaactcatcaagggtgaccagttgtttcgatttgaatgccccactctttggacgattgaagttaaacagtggtgaatagccactttctaaagctgtatccaagttttcgagtaaggtctcatcgtttaaaattaagccatcatacttaaattgatccagtaataattgatcgagttcgcctttttgtagttgagcgagtttttgtttgttcagttgcttcaatgacattgttgggttttgaaggtgcagataaaaggccccggctggttttaccttgctttgcgctggtaaaattgctgcttgatcttgcaagacagtttcaaggtatgtcaacatttgcaatgccaaaccatagtatgcatcgcggaagctaaagctgtgttgactggatttgtaatcaacaattcccaggtaggcttggtcgtttaatgtcagttgatcgatccggtcaattttcccccgcaccttaacccgacgttgattgggtaattcgaattctagaccagctaatccttgttgggcaccaacttggccgaataagacttcggttgccaacggttttaagttcgttcgttgactctgatcgcgcaatgtccggctgacgcgtttaattgtttgactcaattgttggcgaatgtagcccattcgcgctgatttattgaggatcttaaattctggttgttcatacgctttttgtaagatttcatccgtcaatgcatcgatttgttgattatcgagatcgagtaagactaagcgttgggcttgaatcatcttgataaattgatctaagacttggtggtagaaatcaccggtatttgcaggtgtcagttcaaaaattgggcgctcgttcagttttaagccgtattttaagaaataagcgtattgattttgatagaactcttctaatttcgagatcgacgtatggatttcattgccatataacccagtgacaatatcgcttgtcagtgcaacgggttggttatggtacgccagactttgaaggagttgattggttaagtagtgactaacaggaaattgttgtaataaacgataaacagtctgccattggtcaggaattagtgtttgcgtcgcttgtgcttgtcgcgcaacttgaatcaaatcgcttaacaaactacgccaagaacccgtaattggcgctgtacttgtcggaatgacttctgctagaacgcgttgctcggttaaatggaagtagtttttaatccggtcgacatagggggataccgtgtagttcgccccttccccattattcaatggataagtgaaatacaatccttcagtaccacttaaaaaggccaagtagttcagataaggttcaaagctcatctgactggcacttggatcagttaagaattgttctgaattgaaccgatcggttaatagttgccgatcatggtcggataataaggcgctggtttcaatctgatcaggcatcacttgatcggtcgcaccaatcataaaggtaattttgcggcgtttagtctgcaccatccctgattcagataaaacgacctggtcgagtgtcgatggaatttgcgcatattgcgccgtattaaacccggccgctagtaaatcccaaaagccctttagttcgaaaggttggtcgcctaataacgtcacatattcatccaacatcgtcataaatgtttgccatgtctgttccggttggccagctaaggcaatttgattggctgcgagtgcttggtcccgccaatttaacaattgtcgatcgacaccttgttcgattaagaattgatagagcactttagcggcatcgcgccctgttttggcactgtctaaccgtttataaaatggtggtaatacggattgaacataatgccgaatccgattgatccgttccgtgagcacttcatcttctgttgttcgaacaccatcttggaaggaaccgaaccgataatattgccaatcggctgcgcttaaccaatcatgcccttcatacccactttttaaaatcagattttcacacaaatcaagatcagcccggaattcagcgactgattgatagtcatctggtattaaaagctccgtcttcaaaagcgccattacatcttcatagcggtagtaatgctctttcacatcaaacaacgctgccaacatcgcaacaagtggatgggccgccattgtttccggtaaatcgcagaagtacggcacttcgtattctgtaaaaatcggcgcaatcattgtttcataaggggctaaatgccgagtcataatcaagaagtctcggtagcgatagtggccggtttggactaaacgacgaatttcacgggcaacataccgtaattcggtataccgattttcggcaccgatcacttgaagttgcgtcgaatcgatttccggtgctgttgggatctgaccgtggttttcagaagcaacccagtaccgatcaagcgcgagtaacgttggtgaaacccgctggttagtggcaatctgatcagtcatgatgggaatgtgattttgcttggcctgttggtataattgataatacgtacgctcagcttgataaaagaagctgagtttttccggtggttgttggtaattaacatagtcggtaattaaggctacggttaagcttgcttgctgcattaagacggcgactagcgcttgttcttgagccgtgaattgtgcgaaaccttcgatatagaaatgacaatcgtgtaagtcttgtttttttaaataatcagttaaggcatcaattaacgtcgtattttcgatgaattgcttttgcatagcggcttcaaacgccgtggcaataatggttatttcccgcaatttagtagtcagttcgacttcttcgggcgctagctgggccgcaatctcagttagctcatcgggtgtaatacagcccactttaagttccaatagttggctcgttaattgagcaacaaagcctgtttgattgacttccccaccaaataagctgagttcttctgcatgttcttgcaagaggcggtagacaaggatgtttaacccggcggttgaaatccgcggaatctggtagtacggggtatttttcatgaaataccaagctaatcgacttaatgagaagacttggacgcgtgaggttgcgacatactcacttccaggggtttttaggtcatttaaaagtgcgacttcagattcaaatttgatatgattcgggaccaaataaaaaaagcggtccgtgttggtggccttaaggtctgtttgtagttgcttgactagtgtttgatggtggtcataactagctgtaccaataataaattttaagctcatggcgcccacactcctttggcgtcattttaccatagatagacaagtgattgggataaaatccggctagtccgttggtaaaaagcgggtataataggaaacccattaacctgtgcccaatttgatttatgtggcggtcatttttgttttgcagtatagtagtaagggtatcttcaagtcagaaaaagagattaagggtgattgtatgcagactggtgttggccaaagtcatgcgaaaattattttaattggggaacacgctgtcgtttatggacaacctgcgattgccctccccatctttgcggttcaagcgcgggtaacggtaactctcgagccggcactccagacaccgcaaattaagagtacttattacaatggtcctctagaacaggctgttggtcagatgcaaggcattcgccggttaattgaacaactgtggcatgcattagatccgaacttaaccccgtttgaattgacgattgaaagtgacttaccgcccgaacgcgggatgggttcttcagccgcaacggccgtcgccatcattcgagcgttatttgcgacttatcatcaagagctcagtcaacaacggctgctaaagctagccgcgctctccgaaaatttaatccacggtaatccaagcgggattgacgccgcgacaaccggcgcaactacaccattatggtttgtcaaagggcagccgcttcaacccctacccattaatttaaaagggtatctcgtaatcgccgacagcggtcaaaaggggcaaacaggtgccgccgtcaaaagcgttcagaatcaaatgatgtccaatccagaacaaacgcaacccttaattgaccatttgggttatctaacgcaacaagtcgcaagaaatattgcccaaaacgaattaacggtacttggcgcgaacctcaaccgtgctcaacttgatttgcgggcactcggtgtcagcaatgcccgtgttgatcatttgattgatgtggctaatcagaccggtagtttgggcactaagttaacgggtggtggccgtggtggctgcattatcgccctggccgctacgcaaagtgctgcggatgatttggcacaagccttatcagcagctggtgccatcaaaacttggattcaaccactacacgcactttaaaaaaacattaggagtattactatgggacaatcaattacagccagagcacatacgaatattgcgctcattaagtattggggaaaacaaaatccggaattgattattccgtataacagtagtctttcaatgacgctagatcatttttatacagatacaacggtccgcttttcaactgatttgactgctgaccaaattagctttaatggtgccattgcggataccaaaactagtacgcagatgagtcagtttctcgatttaattcgaaaacaggcgcatctgcctttatttgctgctgtggaaaccattaatcatgtccccaatgctgctgggttggcctcttctgcttccggttatgcggcattagctgctgcaggtagtcgtgcagctgggcttgaacttaacgatcgggatctttcgagattagcccgccgtggttctggctctgcaacccgctcgatttatggtggttttgtggaatggcaacgtgggaccaatgatttggattcatacgctgttcccgttcaagaaacagttgattgggacatccagatgattgcgattgtcttaaatgatcgtcaaaaagccatcgccagtcgtgctgggatggcgaatacggtggccacgtcgccctactacccagcatgggttgaaaccgctcaagccgcaattccggcaatgaaggccgcaatcgttaagaaagatataaatttggtggggcaattagcagaacaaagtgcgatgcagatgcatgcgacaacccttagtgccgtcccacctttcacctattttgaacctgaaaccctacaagcaattaaagtcgtgcagaccttgcgccaacagggtgtttcttgctattatactatggatgctggtccaaacgtgaaagtgatttgtaccagtcaggaaacacctcagattttagcggcgcttgcgccctattttagtcctgaacaactccttgttgctaaaccaggtcctggtgtgagctatcgataatgcaaatttaagttaaacgtgaaaggttctgatggtttgataacggctaaagcgcccggaaagctgtatattgctggcgaatacgcagtagtagaaacaggttttccggctattatcgtggctttaaatcaatttgtgacagtcacaattgaagagagtcatgaatatgggagtattgtgtctaaacaataccaagaaaattccctttattggcaacgacaaggtgatgaaatggtttttgataaccgcgataatcccttccattatattttgtccgcgattcgcttaacggaacaatacgcacgtcaagcgggtaagacactgcgcgtctaccacctacgggtaaatagtgatttagactctgctgatggtaaaaaatacggcttaggcagttcagccgccgtaaccgttgcaacggtaaaagccctctgcgccttttatgaattatcactatcaaacgaccaattgtataaacttgctgctattgcgcatttagatgtgcagggcaacggttctttaggcgacattgctgctagtgtttttggtggctgggtcgcttatcggtcatttgataaacaatggcttgctgacattcgaccaactgttagtctaacggagctgctcgaaatgccatggcctagtctttcaatcgaattattaacaccgccagcagagttgtcactcttgattggttggacggggtcgcccgcttcaacctcgcacttggtggataaaattgcccttgctaaaacagaacggcaagccgattatcaaaacttcctcgcagctagcaaagcttgcttagaagcgatggtcgaagggtttcgtcgtaatgatttagcccagatccaagctgaattacgccacaatcgtgccattttacaagatctcgctcacttcagtcacgtcgctattgaaacgccaatattacagaaaatgggcgcattagccgaggcaatcggcggtgctgccaaaacatctggtgctggcggtggtgattgtgggattgtcattattgatcgcgctatcgaaacagaggccctctttgaacaatggcgggccaatcaaattgaacgattgaaccttgcagttcacctcgtagattaggagcttacccatggtcagacccaaacaatccattcaatctcatcggaaagatgaacatgtctttttagcggaaaaattccgccatggtgatgccatcaatgactttgatggaattcggtttatccatcaaagcttacccgaaattgcggtatccgacgtggatatcagtaccgattttgccgggactaactgggccagtcccttttatatcaacggcatgaccggtggtagtcagcagacaaagaaaattaacgcacaattagcgcaagtcgcccaaattaccaacctaccaatggcaactggctcccaatcggtagccattaaagatccgtcactggcggatacatttagcgtgattcgcgaattcaatccccacgggtttgtactcgctaatattggtgctggtaatgatttgaatgtgtctaagcaagccgtcgcaatgacccaagccaatgccctagaaattcacgtcaacacgccacaagaaattgtcatgcctgaaggtgatcaagatttctactggttagacgagattgctaacattgtcgccaatgttggtgtgcccgttatcgtgaaagaagttggttttgggatgagtgctgatacgattgcgcaactcaagcaaatcggtgtacaattcatcgatgtttctggccgtggcgggaccaactttgtcacgatcgaaaacgaacggcgtcatgataaagcctacgattacttagctgattggggccaatcaacggtcgaatcgctctttgaatcacgcgctttccaaaatgacgtcaacatcctcgcttcaggtgggattcggaatcccctagatatcattaaagcacttcggcttggtgccagtgctgttgggatttccggtcaattcttgcacatggttttaaaagaaggcccgacacaaatggcggaaaacttgctcacttggcaagcgcagattcaagagattatggcaatgcttggcgcacgcgatattcaagcgctccaaaaggcgccaattattctctcgcctgaattacggcattatttgaatgaacggcacataacattttaagcagcaaaagcccggtagaaggatttcttctaccgggctttatttgattgcttaattagcaactacgactttgccaatcatttggttcgtttcgaccagttgatgcgcttgccgtaagttggctgctgaaattgggcttaagcactttgtcagggttgattgcaatttgttttgttccaataaggttgcaatctgtcctaagataatgccttgactcgctaaatccgttgtttgatagtaggtctttgagaaaacccactcccaagcgaactcgacccgttttttagttaatttttgtaaatcgaccgggcgatgattttcagtgattgaagcgatgcggccattgggcttaatcaggcgcgccatactctcccagtgttgatcgatgttattcaactctaatatataatcgaccgtttgatagccgagtgcgtgcacctgttcaatgagtgattgatgatggttaacgacttgatccgcaccatgggccagcgcccacttttgcgtttccggacgggaggcagtcgcaatcacgtgcaatccggccaaatgtgccagttgggtggcgatcgaaccaaccccacctgccccattaatgattaggatggtttgatcatgattagtggttcgatcttcaaaatcaatgtgtaatttctcaaataaagcttcccaagccgtcagcgctgtgagcggcatcgcggcagcttgcgcgtccgttaaattctgcggtgcttttgcgacgattcgttcatccactaattgatattcgctattactacctggtcgtttaaagtccccaacataaaagacacgatcacccggtttaaataacgtgacggcattgccaattcctgtgacaatcccaacagcgtcccagccaagaatacggggcgtttttgattgtcctctacccccttttcgaacgccaacatctacagggttaactgaaacagcggtcacttgtacgcataaatcgtgtggttttggtttgggactggggagattaaaagccattaaactttcttcatttgtaatcggtaaatgtttggtaaaaccaattgcttgcattaaaaatgccttctttcttattcaccattagtctaaaacattaattgccccgtaacaatcgtgtatcgaatgtaacgagttacattgttttcactaggcaaatgactgctagcggactataatggcggtatcaaaggaggccatttcatggttcaagaacggcacatttatgattgtcaggcgggctgcccggttgaaagcacgcttcaaattatctcgggtaaatggaaaagtgtgattatttatcaacttttgcaacattcaaatctccattttgatgatttgacgcgcgctttacccgattgttcgcgccgcatgttagccctacagctggaagaattaattgcggatcatgtgattactaaaacggtgattagtctccggccgttaaagactgaataccaactctctgaatttggtcaaacactgagtcccgtgattaacgcaatggcaacttggggaacttattataatcaggttgcacaacaggatgttggatactgtaatttgcagtaatgcctaaatttggatattcgctaaagcacttgacaaattaacttggataatgtaaaaatatagttgttaaaagtataagtaaactttgataatgaagtggtgcatattgaaagaaacgaattatgtcgaaaataaagtctatgaataccgagtactccaacatctttctcaagaaaaattaggtcaagcggttggtgtttccaagcaaaccatctatgcaatggaaaaaggcaactactcacctagtttgattttagcctttaagctcgcacgattttttgatgtaccaattgacgttctattcacttatcgggaggcgtaacaatatggcccctactacactttttaaatcaaaatgcccatgtaatcgctggtgtggcaatcggattaatcatcatttcaattctgtttttctactatggtataactagaattggacgttcggatgaacgctcacagcttattatgtatcgcgtttttaaaacgatgtttgcagcgtgtttattatcgatgattttatttatgacttttgtgccagaccgcttaacagcagttcgagattggtttacaactctattcagtcttgtatttatcagtggcgcatgcgctgtttttattgaaccacggcgtaaagtttaacccttaaaaaaaaacggtttagtcaatctaatgactaaaccgtttttttaatatgttgtttttcgtccttttggaattaaataataaaagataccgattaagatgagatcaatgatcatcaatccaataaaaatcgctgttcgacccgttaggtaaaagaaccaactaccaattgagaagccaatgattgagctaacaactaggtgcagcgcaaaaatttgggtttgtgccacgcggaatttacgatataaaccagtgctgagccctttttgtgcgtgataaccattgataacttggctaaataaataagtgaaaccgaccgcgatgatcatgaggacggcaattaccgcgattacacccgcattttgacggagccagttgacgccgactaacggcgtcgtcttcggtgttaaataactgtgcttagtcgttttgaaaatcttttggtaagttttcagatgcgctcccatctgcggaccatcaaccaatacggtgactttattcagtgggcgatcatttaatacaaattctggtgacgtggatacaaaaatgtgctgatcaagcgtagttgtctgattcgtaccgacaacgccaatcacggataagtagcgaccatgatcttgataatacgcttgactagctggtttgtagagttcagcaagtcgtgattgaccagcaacgacgactggaatctgtgatttgaaatcgtaactggagaagaaccggccgtcttttaatgggacactcgataacttccctttcgcatagacatatgagaaccgggaatcaacgttgaattgaatttgaaaatggcttaatttcgcggcatcaattttttgaatggttttttgaatcgactgttgactcttagaattaaaaatcacagcattttctgataaactattgtgatttaagcgttggctatagttagtttttgcacgttggctaatcgttaacatgcctagaactgttaaaccaactagtaaacaatctaatattatttttttcaggcgcacagtgggccctcctttaaagcagactattgaatccagtaaaaccgatcacgcattaaatcgaatgggcgtaagtaacggttaatccgtgataaacgggcgtcgttgtgataatgggccgccgtccaaaaggcgtgactattcgtggcgccaaaacgttcgcctaagcacaacaaaacgggggcatttggcattgcacgaagttgttgcagcaattcataatcaactgggacgccgttgggtgaccaggacattaagactgcatcgacttgcggaccatattttgggaccgcttgtttggcgtcaagagctgccactgacgtgactaattggcgccctgtttcattctcggcagtccaggctaaactatcggtacaaatcacatcagcgcctgcctgccgtaaaccagcacttaaatagccgttaccagccatgacttctagaaaacgccaattgggaaactcgcggacaatcgccgccgtcaaatctgtagtgatataggcccacatgccaaagcgattttgcaaatattcacggtaattgcgcagtaagtggtcgattaactgtaactgacgttgaacctcagccacactagcggcgctaaaagccccctgttcagcctggagtaatatttctaaatacagagattcatcaattcccaaaacgggtaaattatgtatgggcaagccgtcctgttcaatctgcaataaactagttaaaacagcatgaatttgtacttgaatggctgggacggttgcaaaaaaacgttgactctggcgcaatttctctggataacttaactgtatcataatggattccgtttctaatataagtttctcttaaacgattagaaaaaccttcccaatcggaaggccaaatcgaacgttttaacgaatcccgagtgcaatgcgtgcataacgggacatcttgctggtatcccacgctgggtaccagacgagattgactttaatttcattgacttctggaattttgcccattgcttgatgaatcgaatccgttaaaacatcggttaagggacagcccatcgttgtaagggtcatatcaatcgtacataagccattttcatccaggtttaaaccgtaaaccaagccgagattcacaatgtcaatcccgagttctggatcaatcacggtctcgagcgcggctagaatccgttcctttaagtcttcaattgctgcatcatcttgtggttggtctgccatgtgtcctgcctcctggtcactctaatagctctattatactggttcaaccgaccagttacaactgacgatcattgacaacaatccgcataccccctagaataaaaagacatatcgtgttttaaccaaacacgtttttaaaaggaggcgccgctatgcatcaaaaattgattgcactggatttagatgggactaccctcaattcagatgcccaaattacacttaaaacgcaacaaactttaactgaattacaaaacgctggccacattgtcagtattgtcacagggcgcccaaatcgtttgagtgaacctttctaccaacaattaggtttaacgtcgccaatggttaactttaatggggctttaatgcacattccgggacaagcctgggccggtgaatatcaatatacgattaataaagacattgtctttagtctcttccaactaaaagaacgctttaagattcaaatgattgccgccgaaggtaaaacgatgtttttagctgatcaagcttatgccaacacgttttctttcttccccacaacgttgaagtccgatgaaattttaacccgcgaatcgcttcggcaagacccagcggccgtcacggtttttgtggaacgcgctgatcaagatgcgttacgtgctgaaattctgcgccaattccctgacgtttccgtcaacacttggggtggtcctgctagcgtcttagaaattgtgcatcatgggattcacaaagcaaccggcctcgcaaaactagcggcacactacgacattgatcaatcagatatcattgcctttggtgatgaaagtaatgatttggatatgttagcctatgccggtaccggggttgcgatgcaaaacgcaattgcaccgatcaaggcgattgcagacaacatcacaccactgacgaatgcgcaagatggtgtggccaattatttacggcaatattttaagatggattaatgaaaaagcgattcgacaatttctggtcgaatcgctttttttgatggatgaaacgtgcttttcaagctaactttctgtgcttagctacatccgtcaaatcaccgattttgtcggtaatctgcctgattaggctaatcctcagaagatacccggcttattgcacactctattctgaaacgtgctccgtcagatatacacttccggttagttacataccgcaaacgatcggctacgccgctcattcacggtattagactaatcctcagcgtatgaccatctgacgtcgcactctatttttcgtcgctctttagcacgccgcctactgagtagtggtctggttgcatttcgtttaggacaacgtgcacgtgttctgcaggtgcgcctgtgtttttagtgattgcttctgtgacgtctgcacagagttgttttaattgtgcttggctccggccagcgattaaatcgatgtgtactaatggcatgtgtggtgcctcctttaattgaatacttatattatgcctgttttaacgcaattgagcaacggtaattactgtgtttttaagcaaaagaatgtataataatagctaatattgatttatctatggaggcattacaatgagtgaacccctttaccgtcaattgacggcctgtaccagtgttttagttggtaagaaagccactgcagacggctcaactttaatcgcacgtaacgaagatagccaggcagcttggcctaaacatttaaccatccatccccatcaaaagttaacgactgccccgcactttgtctcaaaagacacgggtttttcaatcgatttaccacttgaagccgcaaaatacacggcgacacccgaatggaccgatgaatatggactattcgaagaagacggcattaacgaatacggcgttgcgatgagcggcaccgaaagtgcttatagcaacagtcgcgttctcggctttgacccctacatcgacaacgggattgctgaagaatccatgattacagtcgtcttaccttacgtgaaaacggcccgtgaaggtgttgcgcggctaggcgccatcgttagtgaatacggcaccactgaaagtaacgggattctcttttccgatgtcgatgaggtctggtatcttgaaatcggcagtggacatcactgggttgcccaacggattccggatgatagctatgccgtggttgccaatcaactcgcgattcaagaagtgcaattcgatcaaccggattggttcatgacttcagacgggattcaagattttgtgcgtgataatcacctatggcaagctgatacgccatttaacttccgcgatatctttgggaccaaagaccaaagcgaccttgtttacaacacaccgcgcgtttggtacggtcaaaaattgttaacgccatctgtcgcacaacaacctcaagactttaacctccccttcttacggcaagccgatgcgcccattcaagtcgaagatgtcgcgcgaattctaggctcgcattatgaaggcacggtctacgatccaatcggtcacggcacaccacaagaaaaacatgctttccgcccaattagtttagcaaagacgcaagaatcacacattctccaaatgcgccctaacttaccggtcgatgtcagcgggcttcactggttatcaatgggtgtcacggcacaaagtgtctacgtgccattctatgcgggtgccgatgacgtcccagtcaattaccaaaaagggacaaaggattacagtcaagattcgatctactggacctataaattagctggtattttggtggatgcacactacgccaagttcgccaaggacttggaacaaacgcaaaaacacatcaatagcttaatggttcaaaatatcgtaacaaccgatcaagcggttgctgctgaaaccgatgcggtccaacgaacgatgttgatgaccaagggctctgcaaaagctgcgcaacttgcccaacacgaaatggaacgcctcaccgcaaaactgattacggatagcgcgaacctatcaccactcaactttacaacggatagtaatttatagataaaaatggccccacatcgtattttgatgtgggaccattttatttactcagcaatcatctctctaatcttgtaagttccacttgcgtgtctaacttctacccgataaggatgtccatggacaactgatttagaaggagtaaatacatttccatttagggaaccatagtagttttggccattggtgacttctgccagatagctgttgtttcctaatacgactatcttataatgcttaaataattcgttagcaaaggtaacgacgattttattatttttaacactcatgtcagcaactaaagtgttcaagaacagttgctgtgcatggttaattctttgagtcaatatcgtcttttccgagcccttaactgcgttaatttgtgttcgtaattaatctaataggtcttgtgtgacctcaggtttcaactgatcgtttgtttcaaataacgcttcaacttgacgtttcagaagaagaatatcctgactaatcattttgagaatgtaagacttgtgcggtaattcagccactacggtaacaacatgtgcatccgcttggttaggaattgttaagacattatcgtcgagctgaccaccactactgataccatttttgacctctgcaactggttggtcgtcaacaagtaccttaattttcgcatagtctttaaacttctcatcagtaaacgataccactaatgctgattgtgaatccagttgaatatctttgactaatgtagctaggtatttgtcttctaattttgtaaatagttctaagagtctttctttatagtcaaaagtagaaggaagagcatcaattcgatttcggagagcatctagtttagcttgggttagaattgtaccaatcggttctgatgcattcaaatagtttaataactcttcttcaagtgcaatactatcaattgagtgttcatatcatttaaaagtaccatttttattttgctgttcaattgtaatcacatcagtcggtttaagcatctcgattgtttcccaaacattatttgttaacatactttcaattggctctttattgacgagtttggaaatcacttgtccattctttttaaggattaattgctcatccttaaatacatcggtttggtagtcagtcaggttaacttgaataccgtggtcattcagcgatacggtatcgattaagcgcatgggtaactgtttattagtttctttatcatttaaccaaatagcttctggtaaaggtgctaattgactaatttcagctttaactgctgcggaaatatcaaatccccattgttcgaaataaggctgcatattataacccgtaattctagaaacatttagaacaaagttttgcatccgttcattgtctggtccaaatgcaagcttgttttcacgatagtattgatgtaaaacggggtaaaagttatcaccaaatgtatttcctaattgaccaaacataaccatctttaaattattattttgtgcgttgaattgcttattatcagattttagataagtatgcatttctgggtagtattgatctaacgatgttattttaccagtcaattctttttgagccgctaatgcataaatgttaacacttgattctacaacagcaccccatttccaaggtgtttgttgtctctgatgaccactttcatgccagatgctccaaccttcatttgtcttcagtagtcgttgcaaagcgcgatcattatggaagcccataaattcattttctgtatacatatacaacttaggtgactctaagaaatgttggagatggcgatcaacaaagtttactggatttccttcagtagtaatgcctgaaacccgatcttgtgccgttaaaaaccgatcataataagtcatcagttctttagggtcaccgagatattttttagccattgcgtaactaactgtaattaatgctttgttactgaccaactgcacatctttagcattcgtcatttccgccatttgtttctcaaagtctgcgacgctagtttgatttaaatcgaaatatggcattgatcctgttgcccctgatattgtgattgttgcttcaccagaatcattaggattagtcacataaatcgggccctcgttttcaacggtaatcgttgtaatgccctttgttaatggatattgtttttgattttctcgttcgggcgaaccaattgtgatagataatgaatcttgcatcccctgagcaactgtcaaaacatcccctttttgggcgtataaaccgctaggctctaaacttgagtagcgtaatgttctgcgttgccggtctttttctttaaaaacatcaccacgaccaatataggttttcatttcttgtggtgcttttagattttgctggtgcctcaccttggatttgaggctatctgctagcacgctactcgctaaattttggtgattgtcacttggttcagccttaactgtttgtatagaactgatggtgctagttgttaggattcctaacgctaaaattccgattacattcttgatagtctcatcccctaaaagtattattatttttataacatattcagattagcatggactgctgaaaattgtctattaaaaaaccctaatgatttctataattattccattaatattaaaaatgtcaataatgataactacaactattacatttaagaataaatcgctctataattgtgatgacagtgtttacaattgtgtaaaataaaataagacccaccacttattaagtgatgggtcttattttattcagttataaatgtattataatgaacacccttattaaagtaattccgctaccaatggccaattgatcatcttccaaaagttttcgatgtaatcaatccggttattctggtatttcaggtagtacgcatgttcccaaacgtcaagtccaagtagtggtcgattacgactcataagtggtgaatcttgattaggcgttgtcatgatttgtagttcaccattttgatcgataacaagccatgcccagccagagccaaatacaccaagggcagcttcggtgaatgcttcttggaacgtcttaaacttcccaaagcgggcttcaatccgttcgagtaattcccccgttggtgcttctggcgcattcggtgttagaattcgccagaagaaactatgattggcatggcccccagcattattgcggacaggtgcttgaagattctcaggtaaatcatcgatgtgtgttaacaaatcatgtaatgatttacctgctaaatcggggtgcttggctagcgccgcgttgagttttgttacataagtcttatgatgtttgtcatgatgcagatgcattgtttcagaatcgatatacggctctaaggccacatattcataaggtagtgctggtaatttaaatgtcattgttcaccctccttgttataacctcatcatacaagtctatggcgttaaaaagcgaataatatgattctacgaccattgaaaaaagccgactaatgtttattagccaactttttttgaatcctgggtagctgcgtatcgatttctgccaacatcatgttcggtgtcttatgttggaaaaaaatggtgtagtccgcaagccgataatactttggtcgtcgtttgtgatacagttcgcgtaaaccatcgtggcccaattgattcacaagtggccgccgatcattgcgcgaaacgcggcgccaatgtgcttcataactcccatttaggaaaaaaatggggatatgactctgttcaagtaaatggcgcgtctgagcatcatccacgaccccgccgccggttgcgataatcccatcgtgttggatcaatgtctgtaaggcctcaaattccatttgtcgaaatgcagcctgccctttttcggcaaagatttcgttaatcgtcatttgctgttcttgcatgatgtagcgatccaaatcaatccagtcacaatggtaatgatgtgcaactttgcgtgcaatggtcgttttaccagaccccataaaaccgattaaaatcagttgcatctagtcaatcaacccctatggttctatttcaaatatattgttggttccaagactgctccgcacatacggtcagttaaacactctttacaagttagtttcattgtaaggtatctgtgggttggttaccagtttttttttgaaaatagattagccgctaaagtcgttagcggtatggattgaatttttggaacaccaattgcatcgaggtaaacaagattaatggcatctccttgattcttcttatcatgtaaaagttgcgtgaagagtcgatcactcataagtaacgggctatctgtcggcaagccgaccgcatttaaaacagttgtaatcactggtgttaaatgcgcttcagtcagtccactttgttcgactaagtgctgcatggcaactaacccgatgctgaccgcttcaccgtgcatcaggctgccattggccagggtttcaaccgcgtggccaatcgtatgaccgtaatttaataattggcgttgattactttctttttcatcggccatgacaatctgtgccttgtagtgcacactttgctgaattagtgtttcagcctgcgctagaatcatatgcgcactttgaatccctgtcacctgttgccaaaatgtcccaccgttgagtgcagccactttaacgatttccgcataaccggccagtaattggcgttgatccagcgacgttaaaaagtcgggatcaatcaatactaaatccggctggtaaaaagaaccaactaagttcttgccagctggtaaatcaagtgcagtctttccaccgacactactgtcaacttgtgccaaaagcgaggttggcatctgaataaatgcaatcccccgcatataggtggacgcgataaaccccgccaaatcaccgacaaccccaccacctaaagcaatcaccccgtcatgacgggtaaaattcgccgctgccagttgggaataaagtgccattgcttggtcaagtgatttcgacgtttcaccagccggaataataatcggtgtgacttgatagccaacttggattaattgagattcgaccgtttctaaatacaacggggcaacattcgtgtctgtgattaatgcgatttgacgaggtgtccaaacttgcgcgatttgttcagcacagatgtgatacaaaccagattggatccgaatctgataatttttttgtgtgaggtggacatcaattatcaccattagtgccgccactgtttgacgactgcatcaacggcccacacttgatgacacatttcaagataagtagctggctttaaggcttgtgcgccatcagaaaaggctttttctggatgatcatgaatctcaacttgtaacccacttgccccagttgcgactccagcccgagccattggcgtcacaagatcccattcaccagtcgcatgactcggatcaattaagactggatagtgcgttaatttttgtaaaactgggacagcatttaaatcaaatgtgttgcgcgtatagtgattgtcaaacgtccgaatcccgcgctctaacagcataatttgttgattaccgttggcagcaatgtactcggcagcatttaataaatcatcaacagttgctgctaagccacgttttaaagcaacgggaacgttggtttttccaacagctttcaataatgaaaagttttgcatattgcgcgccccgatttgaaaaatatcggtatattgcgccactaaatcaacatgcgtttcatccatcacttcggtcacaacgtccatttgataagcatcagcagccttgcgcaatgctttcaaaccagcttcgcccatcccttgaaaggaatacggtgatgtccgcggtttatacgcgccaccccgcaaaatagtcgcaccgccttctttagcaactttggccatcgccataatgtggtcagcagattcgaccgaacaaggacccgccatcaccgtgaagtctgcaccgccaatcgtactgtgtgctaattcgatgaccgtgttttcgggttggaatagccgactgccaagcacgtaactcggttcatccgtggtggttgccgcaatgacttcttcctctgctggggtaaaatcaattgcttttgcaccgatcaccgctacatggtgcttaatctgatagacattcggatttgtcgtgcgttgtcgtgcgcaaaaatcatcaatcagcgctgaatcagtatttggtttaaattgaataatcataaattattaaaactccttcgttaaagcatgatagatgggatcggtttgtaggacctggcccgtccagaattgaaaactcaacgcggcctgttcaactaacatgccaagcccgttttgggttggatgaccacttcgagccgctaactgtaaaaaagcagtctgacgtggcgcatatattaagtcggcaactaaacaagtcatcggtatttgatcaattaaaggtgctgccagcggtaatccaggggtattgaccatgccaagattcgtggcgttaatcacgcaatcagcattactgagtgcttgttggagtacctgttcatcggcataattatgtagcacgatggacatcgaatggtgattagcaatttttgccagtcgttgttcaaccgccgcataagtcgtattttgacgtttgaagacctgaatcgtcgccacaccataacgagcggcggcttcgataaccgcgagagcagcgcccccaccacccagaataacaatctgctgactagctagattgggatatcttttctgcaaagcgcgccaaaaaccatcgccatcagtattcgtgcctaccaatttacccgatcgtaaagcaaccgtattgatggcgccaacgagttgcgcagttggcattaactcgtccattaatggcacaagcgactgtttatagggcattgaaagattaacgcctgccacaccaagcgtccgaatcgcttttgcgacatcttgcggccgtgcttggctatcgaaaaccagataccgcgcgtcgatttgatgttgtttaaaacccagattatgaatcatgggtgacaagctatggtgcgctggatgcgcaaccaagccgtaaagagctgtataacctgatatcattacattttcctctaaaactatcatactttacttaatgagatttttaaatggttagtatcaaaaagtcatgcttaataaaggctccaatgaatattttaatagacggttacgctggttcttcccgaaaaagaccaattttagccaagtaatgactgatgagatcctatcagcacttgaactaattaatcaacgaccattaaaaatacatcatcaacagactgccattgaaagattccgggcttgttcggattaaacttgtaatttgccgacgcttaaagaagtggtcaaggaaaataatgaccatcctagttatgcgacgcgtttatcaatttattcaagtcaattagccggtttcaatggtgacgtagaaaattaagccaaaaaggccttagcaaaatcagtttgctgaggcctttttttgataacgttttaaatgataactacttgtagacggcgagtggtttttccgatagagttaatacttatagtttagttgaggagtaggatgaattaatgcggaacaaaatgacaatgagcgacaaattattatatggcgggctactggcagctgcggggggctttgattcttacacttatttggtgcacggggaagtcttcgccggattacaaacggggaatctaattttattaggaacccatttggggcagatgaaatggtccgtattattacggcacattaccccgattctcgcctttatgttgggaacaatcttaacgcgcattttacaacatcggtttgaaaaagacgaatcgattaacaaacgacaacggattatcttggggattgaagtcttggtcttaacgattgttgcgggaatttcaccgtatgtaccggatattgttgcaagttcacttgtttcaatcattgcggctgcgcaattacaggaatttcgtgaattggatggtggcccatttacatcattgatgatgactggaaatgtacggacgatggcggaaagtttttatgacgctgtttttaaacatgatcgtaaggcagccgataagggctggcaaattttacgcatcattatcagttttacgattggtgcagtgatggtcggactatgtgtttcattcttaggagaacggacgttgattttatcagcattattcttgttgatgacgatgctaattttacaattaaatccagacaagaaagtttagcctagatatgttacgctaaaaggtaacttgccaaggaggttaatagatgttctttttaaaaggaatcttgatgggatttgcgtttgtcgcaccaatcgggatgcaaaatattttcgtttttaataatgccatgtcgaatacaacacggcgggcagttttcaacagtttgttcatctggttatttgatgcgctcttttcactcgtggcgttttatgggattggcgcactgattgtgcaaaacgatgcggttcggttagccattatgggaatcggtggacttttgattttatggattggatacaccattttgaaaagtgcccgcagtaccgttacgtttggcgcgttagaaccaatgccactggggaaggttattttgactgcatttgtggcggtttggggtaatccgcaagccttgattgatgggacattaatgctgggcgcattgcggggtggtatgacgagtagcgaggcgattccattcatcgtgggggttgtttcggcaaccgcgacctggttctttggtatcgccattatctttagccttttccggaaaaaagtttcaccaaaattcttgatgggcgtcaacttagtgagtgccatcatcatcatcgtgtatgggcttggtttattggtcaaagtggggacaacattgctctaggaagggatattgctttttaatttaccctgttgaatggtatccttaagtatcaaaacaaagcgagggagaacaggatgcgcaaaacaacaatcattgttagtttagtaatgctcggcctattgacgggttgtacagccaaccaaacaaaacattcagcaccccccgctcaaaaagaatcgactagtccgcaacaaacggttcaagctccgaaagtgacgcttgaaaaagcccgtgaattgtacgcaaaacaatatcctgcatcagatttaaccgaggttgagctgaagcaatggggtaaccaaatgttttatgaattaacgggaatgaacgacaatgaagagcttcacatgcatgtggatgctcgaactggcgcaaccagtcgattgtcgaaagaagcccttgatgccgatgaacaaaatggcgtcgagcgacaccaaaagcaattagcgtttgaccaattgttgacgcctcaacaagctcttcaaaaagcgcaacaatacttcaccgggaacgtgatcaaatggtcattggaaaaagatgatggccgaacagtctgggaagtagaaggtcatcaaaaacagcaaaaaatgcaagttaaattagacgctgaaactggcgcgctaattgaaaaagaaacggatgattaaagcagtatgtaaagcgccgtcgagaataatttcgacggcgctttttttgtagcttgtattaataaatttgttatcgatttgaataaaataaattagcattgcctaactttttatttacatttcattaaaacggcgtacaataaaactgttatcaagatcaaaataaggagtgaggataatgaatcaacaagaaaagggcaagaagcacaagctgattgaatatgcgaacggcccatcacttgaagaaattaatgggacggtcgaagtaccagagggcaaaggcttttggaagatgttactagcgtattcaggaccgggtgcattggtggcagtgggttatatggatccagggaattggtcaacatcgattactggtggtcagagttttcaatacctgttaatgtccgtgattttggtgtctagtttaatcgcgatgttattacaatatatggcggctaaactaggcattgtaactcagatggacttagcacaggcaattcgcgcacggacgagtaaaccgttgggcattgtcttgtggattttgacagaattagcgattatggcaaccgatattgccgaagttattggggcggcaattgctttgtacttattatttaagattccactgctgattgcagtattcattacgattttagatgtcatgctattattactcttaacgaaaattggttttcgtaagattgaagcaatcgttgtcgcattaattgtcgtgatttttgtggtttttgcttatgaagtagcactctcagatcctgattgggcaggggtgattgttgggctagtaccaactgctaagacctttgccaccgggccagctgttggtggactaaccccattgactggtgcgttagggattatcggggcaactgttatgccacataatctatatttacactctgcgatttcgcaaacacggaagattgatcgcaagaacgaagcacaggttgcacaaacagtgcgctttgccacttgggattcaaacattcaactcacgatggcatttttcgttaatgcgttgttattaatcatgggggttgcagtttttaaaacgggaacggttaaagatccatcattcttcgggttatttgaagctttgtcagatacctcaacaatgagtaacggaattcttgcaagtgttgcccggaccggaatcttatcaactttgtttgccgttgcattgctcgcttctgggcaaaattcaacgattaccgggacgttaactggccaagtcatcatggaagggttcattcacttgagaatgccattgtggttgcggcgtttggtaacccgcttgttatcggtgattccggtattaatctgcgtcatgatgaccagcaataaaccagccttggaagagcatgaggcgctcaataccttgatgaataattcccaagttttcttagcgtttgccttaccattttcaatgctgccactgttgatgtttaccgacagccgggttgagatgggggatcgcttcaagaatagttggttgattaaaagcttaggttggttatcggtcattggcttgacctatttgaatatgatggggttgccaggacaaatcgaagctttctatggtgatcacgcaagtgctgcacaattggctactgctgatcgcattgcatatgtgttgattgctggtgtgatggcattattggtttggatgattattgaattgtataaaggcaataagcggtttgaacagcaattagcaactgaaaattaattggaggttggtcacatgtcagttttagaaattaaacgaattttagtcggggtcgatgactcagaggatgcgttattagcgtttgattatgcaattgagcgggctaaacgcgaggatttagaattagtcattgtatcggtattggaaaatgacgaaatgaacgtctatcaagcattgaacaaggattttatccacggccaatatgaggatcttgaaaaccacctacgagaatatcaagatcaagcctatgtgcgcggtgtgaatcatgtgcgaacagtaattgcagaaggcgaaccaggcgaagcgattatcgaagatgtgattcctaaggttaaacccgatttgttaattgtcggttcgaaatcacaaaagggcgttgctaaatacttcggcagccaagccgcctacatggcaaaatacgcaccaatcccagtgctggtagtgagataaagagtgcgaaaatcgccggagatattctgaggattagcctaacaacggaagaatatggcgattgtagcacgtttaaaaaagcgtgtgttcggttgcggatagcaactgagtattttagattaagcggaggttggtgcaaccaaaaagcacgtttcaaaaagatgtcgataatttattttgtcggcatcttttttatatgctaagctgagaaaataaaagtttaagcggaggatagattgtggataatgaagtcgcagctttttgggatgattttgcagcggaatactatcagattcaacaagagtcacaggtgtcgattgtcactgacgttgtggcttttttacaggatcggcgattactgcctgttgagacagtggctgacttaggtggtggtagcggccgttatttgccacctctagtgcaaaacagtcaggcttatacgattatcgacatctcggcgcaaatgctccagtatgcacaacaagaagctaaacagcatgtaccagaacaacagattgcttatctacagcagtctgtggctgattttatggcgcaaacgccacaaaaaagctatgatttaatttggatggcgttaaatccggcaatcgaagccaatcaagcattactgacgattaccgaaaagagccgtcagtggtgtgcattcttacggctcactaaaaacgaggacgacttgttcacaccgcttgaacgttattttgggattgaacagcaagatcccaacactacaccggaaatcatcccggctgtggaaaacgtgttaaaagatgcgggctaccaagttagtcaacaaatttttcaatatcaaacaagtgaagttttcgacaggctatttttggaggcctattacgaagaattaccaacggaccaactggcagcttatctagatcaagtatttgcaactcaaaaaacacggaccagtacaacaacgcttgaatatacgttgctgtattggcacgtgttttaagagttaaattcccaccgccaccagtcctgtcggaatattttcaactggtactgggtagaatggcaggccggtttggatggccgcaatcatcatgtgattaagatccatgatttgatcggcgctgattgttgctgatggtgcaagtgcagttgggataatgagtgctgttagttggcgattgttaatgcgtgaaagaataatctcaggatcaccaaggtttgaatcgccgtgatacgcactagcggcccgttctgctaatccgagcgctttttgtcggagttcatgacgcgcatttgtgagtaacttgtcgagtaagtcgtcatctgaaagagaatcaggggaagtttggatggcttgatccatccggtagtttggattaacgacgagttccttgaagagatttaagttgccgggtaatgtgaccacgtaaatcggtgctttttcaggcagcaagtcatcaagatagcggccaatcacgcggaaatagttagtttgatcgataagttgttcattttcttttacaacaaaactgtgggttggacttgagaagccttggacgacttcgcctttacgctctgtgccaatcccaatttcaatggttgttggggcgtctttaggtaaaggataatcccgaatgacattttgttgaatggatttcaaactaaaagtagtcttgttgagacagagaatggtcccgttcagactcagacttaattccgaactgagtggacgcaggtcgggttgatcagcaattagaaaatattcagtcgtgatcggataatgaaggggttggctgtagtgaccagcagctgtgatgtaaaacgcaactgactgtatatgtgctaattcttggggagcggtacttagtaagtcctcaagttggttgagtaaggctttttcttcaggatagtcggtggttaactgttcacggatttgcttagaaaaactattgagcttaatcttgttcgcattaatggcttgtccgccagtctctaagttaatgaataacgagatgactggctgatttgaatcggcgagtaattgagttaaactttctggatataacatatcgacacctccgtttgattaactacaccttatcatattgaacagctacctttgaagaaagatgcctttgtaaaaaataagccaacgagggacttttaatcaacttgatggaaacggtatgctaaaatggtaagtaggttaacaagggaggatttatggtatgggagataagacgaaagtggtaacacccacgaagattagcaaaagtattcggacccgtttttttgtactacaaatggttgtgattctaatccttggcgcgctcacaattaaacttgtgagcggctttagtccattattgacggattcagaaattctaaaaaatacaattttgacagcttttggggcaaccttagtcgcgcttgtagtgtggtacctatcgtataagattattgcaatgcgcattcggcgccaaatcatgaataaagagctagaggatagctacacttttagtttgaatcatgctgctagcagtcttagcttacatattgtgtactttatcagtatgttggtgattgtctggttgatgttgagtgctcaaaacgtgcgccagtcgctagatggcttacaccttttcaaaggtgatcaaccgattgtccggctggtcgataatcacagcatgaagcaaatcgagcaattctatcaagctgataagcaacaaaagatgacgtatcttggcagcaatcgagatgttgcttatttcaagattaataatgcaacgattagcttaccattagccaagattcaattctatggtcaagatgaagcgccgactggccatcagaaacaagtgattcaacattatcacttaaaggatgtgcaaaataagaaatacctcaaacctaatatttatattagtgaatcaggcttacctaaggtggccattacgaagatgtaccaacattatgagccacaaccagcggataagattcataaactcgacattaaataggataactaccacaggagggctggattaaacggctttcatttggtacagttagagatgaatatttttttaaataaaggagatcaagtcatgattgaagcagtaaacctcagagcaggaatgacgtttgaacaagacggcaagttaatcaaagttttagaagctaaccatcataaaccgggtaagggaaacacggttatgcgtgttaagttgcgtgacttacggactggctcaattgttgaaacaacaatgcgcccagaagttaaagttgaacaagcaatgattgatacaaaagatgttcaatacttatacacacaagataacgtggcattcttcatggatcttgaaacttacgaacaatatgaaattcaaacagctgctattgaagctgaattaaaatacttattagaaaacatgaactgcaagattcaattcttcggttcagaagtgatcggggttactttaccaactactgttaacttacgggtcgttgaaacacaaccttcgattaaaggcgcaacagtgactggttcaggtaaacctgcaacgatggaaactggcttagtcgttagtgtccctgatttcatcagcgctgacgaagtccttgaaatcaacacacaagaaggcacatacgttaaacgagcagcaaaataacaagcttaaggccgactagtcccatagtcggtacttcaaagtgaagccaagatggttttctttcgataaaagaaggaatcaccttggctttttatgtttgggtaaagggacaaaaaaataacagagaagcaacttatgatggattgcttttctgttagttatcaaaaattatttgacgcaaatcgtggctttaacaaacaattttagtgaatataaacagttattacggtaacgagtccgaaaataacgccaggaatgttagaaataataaccggccaatctttataggttttattccagccataggcggtccatagacacccattaattgttgcgactaagggctgtaaaggtgagacaggtgaccctgaaaaattagcgataatttgggggatgtatgaaacatacagcgtaatacaggtgattgttgcaaccttgctaagtaattttaaacgtttaactttcttagggtggacggcgttttcgccggtagggtattcgccagcatcaatgcgcataatagactccgtttcatgattgaattttattatatatggttgacttgaaaccgcttaaattctatagtgatagtatgcacgaagtgaaagagagtggaggttttacgaatggcaaagaaaataattcttgattgtgatccaggccatgatgatgctgttgcaatgatgttagcatacggcaatccagaaatcgatttgttggcagtgacaacggtggctgccaatcagacgttaacgaaagtgacgcgcaatgccctcgcagttgcgaccatgatcggcatgcacgatgtaccgattgctgctgggtgttcgcgaccattaattgaagaaattaaagtagcagctgatatccatggggagactggccttgacggggttgttcttccagaaccaacggtggcgcttgaaaaaagtcatgcagttgatttaatcattgatttaattatgacgcatccagctaatacaattacattagtgccaacaggtgcgttgaccaacatcgcaatggcggtacgcaaagaacctaagattgttgaacgcgttaaagaagtcgttctaatgggtggcggttatcacgaagcgaatgcgagtgcagtggccgaatttaacattaaatttgatccagaagcggccaagattgtattcaatgccggctgggatgtcacaatggttggtttggatttgacgcatcaagcgttagcgacaccagatattgttgaacaaattgaaggcattcatactgaaacgtctcagttcgtggttgatttgttagcctttttccgcgatatgtacaagaaggggcaaaatttcgatgcaccgcccgttcatgatccatgtgccgtggcttacgtgattgatccaagtgtgatgaccactaagaaagtgcccgttgatatcgaactcaatggaacattgacgcgtgggatgacggtcgccgattttagattcccaattccaacagactgtcacacatcagtcgctgtaaaactcgatcatcagaagttctggggattagtggaagacgcaattaagacgatcggctaaatagtcaaaatacttgagtagagaaggcgttgtacatgtatcacgcattagaaacccgttatcaagggatgcaatataaccgcgtcggacattctgggttgaaattaccagcgatttcattagggttatggcataactttggtgaaaccgataagatggcgactcaaaaggaaacgatttttggcgcgttcgatatgggcatcactcatttcgatttggcgaataattagaggccaccagcgggcagcgccgaggaaaactttgagcggattttacatgataatctgcgtcgctatcgtgatgaaatgattatttcatcgaaggctggctattatatgtggcccggtccctatagtgagtggggctctaagaagaatattatcgctagctgtgatcagtcactaaaacgacttcagtcagattacgtcgatattttctatcatcaccgaccagatccagatacgccgattgaagaaacagctcgggccctagatttattggtgcaacaaggaaaggcgctatatattgggatttcgaattattcggcagaacaaaccaaagcgattacgaaggttttcagagcgctcgggacaccctttattattcatcaaccacgttataacatgctcgatcgatggattgaagatggactaacggatgtcttggcggatgaaggtatcggtgcaattacgtttagtccgttggcacagggattattgaccaatcgttatttaaacgggattccagccgattcgcgggcaagctcgtccagatagtccctccctatcacctgaaaaggttgatcaaacaatcagtacggttcaagaattgaacaaaattgcgcaacaacgtgtgcaatcattggctgaaatggcgcttgcgtggaatttacaacagccgactgtagccagtgtgttagttggtgcttcgcgcttgagtcaattacaagacagtgtgcatgcactagataatttaacgtttacggccgaagaattagcggctattcaaaaaatattagcataaataaaacgacgactagctacgtaagctagtcgtcgtttttttttgtttttattcagctgtttcagttgcggttgcgtttgcttggattttaccaagaatcgtacgtgagaaaggtcctacgatgattaattgtaatggtaaagcgacgataacgttcattaaccaagtatgacggtagacgctacctaagtgtgcagggataccaccttcgataagaataccgaaaagtgacatacatgtaaccatgccaagaatcatcaaacatgaaatcgtcaaaatcatgactaatttattgtccttattaagtggtaaactaaaagcaatttttttggcgattgccccaacgatgaaaacatcgaggatgaaagcgacgatgaagcctgggattaagccggtgaataaagcgccccatgagaggctatcgtggaggattaagttatagatactcattccaagtaccatgcaaaaacacattaatgtcgtaaaaataataccttcttttttattggttggcattttaaatttcttctttctgaaaagttaacagatataaccgtatcacataaaaaatttcggcgtaagcttttttttcagaaaatgagaagtttcttctttttcaatttcaatgggaatctcgccatcatgaacggcgtgaaaaatcgaaacgagcaataatgcgcagacaaaaatcaatgggaacccagcaatcacgcaaacggcttgaatggtttggaaactaccgacaagtacaattccaagtgaaaatagaatgaaaatgatcacccaagccatccgattccaacgattaggttgttctccgattttcaattcaagactggtaaatgatgagacgatgaaggccgaagaagagatcgttgtcgccaggaaaatgaaacatgacagacagaaaattgctaacatgataattttgaacggtaaggtcgtgatgaccgccgcgatgacagcggcttgtccttgggtattcaatagatgaacaagatcgatttgaccggaacgttgtaagaagagcgcataaccgccaagtacagcgtaaaagctcatacaactaaatgcgccgtatgtcgccattcccaataaaacttggcgaatggttcggccgcgtgaaatccgagcgatgaataagcccatgacaggcatgtaagataaccaccatccccagtaaaagagggtttcgtgttgtgcgaacgcactgtgtgcaccagtctgatttaaacttaaacgcccgaagttaccaaagagatggaagacatcgcggccttcagcgccaattagcttgaatgtcggaccgattagtaagacgagtaataaaaagccaatggcagtatagatatgccaagcactgagcttcttaatgcctttatctaagccggcatataccgtgagggtgaatagcaccagtaagataatgaagagggcaagtttaagccagatggtatcattcaaaccggtcattgtgctcaagacttttgaaatcacgggaatttccattccgattgatgagccgatgccccccataatgccgaaaacaacggtaaagtcgattaatttgcgaattatttttttgtaaggttgtggtccttctaataggtcgattgcggcgcttaaacgttgtacccgtaagttcttaacatagagagcgtagccaattgcgacagtcgcggtggcaaaaatcatccatgccatgggtccccagtgaaattgcccacagacgttggcgtagcggtatgcttcagccgagaaaggtttagcgccaaatggtgggttctgtaagtattgcagtggatcagtggtactaagcattaagatgctagcgtcaatcccagttgcaaaaaccatactcccccattggaagtcgttatattctggcttttcatttggttggccgaggcggatatggccatagtgactacaccccaaccaaaataggaaaataaaattaatgatataaataccaatgtaaagccatttagaatgtgccgtcatcacatcaagtagttgtgaaatcgactgctgaagcgtgtcaccccccaacattaaaaatgcggagacaatcccgaacagtaacatcgtggggatgaagacgactttatcaacattcttgcgctttaaaataatattcctcctgaatttgttaaagtctaggttgctggatcaaacaaaaaaagcgcccatacaattggtcaactgaccacctgtacaagcgcgttattataacgtatacaaatgaagaaacagcctaacttgatttacttcttactaataggatagcacttatctcaaatttgttaagggtcgattttacggccgtgcggttgttaaccaattaagatagtcttgttcgcggttaatcgcgtgttctaaaataagataatgaccatagtgcgcatccaccgcagcttgttggctgaaaagggtttgacgccggtcgagtaggtgatccagtttggcttggtgtaaggttttttgttcggtgaacattgcgtctaaatgagcatcattttttgagtcgataaagtatagcttcaaaataaattcgtctttgctggcaataatttcgctggttggggagtatcgccactcgtcaaaaaaggcaatcccatctgcagtgattgaatactgcttcttttttaattttgttccggcgatcaattcgacgtgggtgatccgatcagcctgttcgagtcgcttgagttcaggatagatttggctgtgttgggcttgccagaactcaccgatatcatcttcaaagacgcgttttaaatcataaccggttttgggagactgatttaacagcccgagaattaagtattggagaatgtttttttgggccatctgaaagtgcccctttctgtgaaatcaacttagattaagtatagcacaggccagtgttgaaaaatggttactttttataagtctttttaattgcatttcataaatagttagcgtaggctatttcaatcgggtaaaagtgcgttcaagcttaatcaacttttgagtattagtacggggaagcgaattagcgacgaagtcgatgatttgattcacggtgctaagcgcagaagtctgcgaattaaaagcacgttaaagaaaatgagtgcgtcaaaagtggttatcctgtgaggattagccaaattagcggtgtaaccgattgtttggctaatgtagctaaccggaacaggatgtttttgaaagcacggtaaaaaggagttttatcaatggcaaaaaaatcaaaagtggcaaaattagcaaaacaacgcgcattagtagcgaaatacgctgacttgcgcgcagaattaaaagcaaagggcgattacttagccctttctcaattacccaaggattctagcccagtgcgattgcggaaccgcgatgcaatcgatggtcgaccaagaagtttcatgcggcaatttggtatgagccgcatcaactttcgcgaattagcccataaaggccaaatcccaggcgtcaaaaaagcaagctggtaaaaaaatgagtgcgttaattcgcggttagcctttgagcacttgcctaatcagaaggataagcgccaagggcgattgtctggttgatgtagcaaggcgcagaaggttgcgaattaaaagcacgttaaagaaatagaagcgcgtttgaaacggtttgacttcgagcactagcctaaatctgtaaatgagcgacgtagtcgattgtttacggattggagctaagcacagaagtcagtttcaaaaagcgcgttaaagctagaaacccacaaaagaagaggtcgtcccacggcctcttttcttgtggggattgaatacgaccttaccggtggtcttgaatttagcgttagtgggttacgaagatgtgatcggcacggccagcgggttgtttagttttggctactacctcgcaatcagcgccttaacgtacggcatgagtctattgcatacgggatcgaatactcgattaccgttatacatgatcatgattgttggcgtgatggctctgagttatggattcgggattcgttcaaaagcagtttaaatgtaaaaagcgcgcagacaatcagttgtctgcgcgctttttatttaagcaagttgttgttgcaaaccagcgaggaaaatatcgaggcctagcatgaatttttccagtgagcgttgttgttggtgccgatgatgttcaaaagtttttaagaaagcattgtaatgattgtcagtcgcaatctgctgcattttaagcggtaactgtgcaagataagtgtctttatgttgtgagacgcgatgtttcatctcaagctcaccggtgatgtcagtgaagagaccggacatgaagtgatcgatggattcaatcgctaggcttgcttgttctggcgtgaaaccggcatccaaaaggatttgaattaagtggttgataagacctaggcgggccttagttgcagggacggtccgcatcatcaactcagcggcatagggctgtgctatgtaagtggtgtaaatggcgctaaaaatttggcgaatttggtctgtccattctaaggttgtgttacatggctcaatctcaatttgttgaataatgttatcagccatcgcctgtaggagggcttgtttgttttcgaaatgccagtaaaatgtggccgccccgatgtctaattgattggcaattttacgaattgaaagggcatcgacggtcccggatgcttgtaaaatttcaaacgcggcagtgatgatttgctcggcagagattgactgttttaccatattaatgaagctccttcactttttatgaaaagatgattgtaattcgttttaaaatttgataaagtagtaactcgaacactgttcgattatactgtacaggatttgtacaggagattcaactacagaaaaagagggatgctcatgtcgatacttaaacagcacttaaagccttattggggcgtgtttagtctttccattttagcgacggttatttctgttgcgtcttcactatggcaaccaaaactattacaagatgttttggaagggattatgaaaggcgatcaagataaggtacgtcaaattggaatttatttgattgtaattgccgtggttggtttaattgcgggcgtggtcaacaccattacgtcggcgatgacggcgcagggaatgactgccgatatgcgggaaactactttccggaagatacagactttctcatttgccaatattgaaaaattctcagttgggaatttatccgtgcgtttgaccaatgatatgacccaggttcaaaacgtcattatgatgacgctccaaacgatttttagaatcccgattttatttgtcggcagtttcatccttgcgatgaattcgattccgagtttatggtggattatcgtgctcttagtgatcgcggtcttcatcattacattcttatcaatgggttcgatggggaaacacttcggtgccatccaaaatttaatcgataagattaataacctcgctaaagaaaatttaatgggcacgcggattgtgaagtcttttgtccaagaagataacgaaatcagtcgcttctcaaaaacaagcaatcaattagaacaccatacgacaatcgtcgggatgcttttttctgtgatgattccagcgttcatgttggtggcgaacttagcggttgtcgcatcaatctatttcgttgggaacttagtcgatacggatccagaagcgattgcggcgattgcctcatttatgaattacttaatgcaaatcatgatgtcgatcatcatgggcggcatgatgatgatgatggcatctcgtggggcagtttcgttgaagcgactccaagaaattctttcaacagagcctgatatcgtttatccagatgtccctgatcaaaacttagcggggacgttggaattcgatcacgtcagcttccgttatccagaagacgatcgtaacacgttaacagatattaatttcaaaattaacgctggtgaaatgattgggattgtcggcgcaactggggccggtaagtcaacgatggcgcaattgattccgcgcttgttcgatccgactgaagggcagattaaaattggcggcgtgccaatcaaagatttaaacgaacataatttacacagcgccgtttcatttgtcctccaaaaagcgattttattctccggcacaatcgcacaaaacttgaagcacgggaaaaaagatgcggatgacgccgatatggaccgcgcaacggggattgcccaagccaaagagttcatcgaaaagcttgctgatcaatatgatgcaaccgtcgaagaacgcagtgcgaacttctctggtggtcaaaaacaacggctctcaatttcacggggggtaatcgggcaaccgaagattctgattttggatgatagtactagtgccttagatgcccggtctgaaaaattagttaaagaggcgttagaccgtgaattagctggcacaacaacactaattatcgcgcaaaagatttcatctgtggtcaacgcggatcggattttagtgttagatgaaggtcgtttagtcggtgttggtaaccatcatgaattacttgaaaccagtgatgtctatcgagaaatctttgaaacgcaaaaaggaaagcgaggataaccaatgcgagaatttaaccgagcaatgaagttctttttccattatctaaagcggtataaaccttcttttgcaatcatcctcgtgatgactgtgattgcgacttatcttcaggtgaaagcacccgaatatatcggggacgcgctcaatgagttagtcaaatatgcaacgaaatttcaaattttaaaagcccaacatttgccaaccagtggggcatctaaagacgccttcgtagaggtgattgtatcgttgattttattctacgtctttagttcagcagcgacgttggtatcaggcgcggttttctcacgcgtcaacgcgttatcaaccaaccggatgcggattgggttattcaataagctccaaaaaatgcagattaaatatttcgaccgtcattcagatggcgatattctcagccgctttacgagtgacttagataatatttacaatgcgatgaatcaagtgttgagccaacttgtatcaggcacggcgctcttaattggtttattgattatgatgtttagaaaagatgtgcagctcgcttgggtgacaattgcttccgtcccaatttcattcatccttgcttggatcatcattaataaagcgcaaaaatacgttaatgtgcaacaagatgaagtcgggaaactcaatggctacattaacgaaaaaatcacgggccaaaaagtgattattactaacagccttcaagaagaaacgattgatggcttcattgaacataatgaaaatgtccgcaaggcgactttaaaaggtcagatttattctgggatgatctttccgttgatgcaagggatgtcgttggtgaataccgcaattgtgatttcctatggtagctggttagcggtgaacggtgacattaaaaagtcgatcgctttgggtttagttgtaacattcgttcaatattcacaacaattctataaccagatcgcacaactttcatcgagttacagcatgattcaattggcaattaccggtgcccgccgagtgaatgaagtgtttgatgaagacgatgaagtgcgtccaaccgacggtgtgcaatttgagggcattgaacgctccgtgaccatggaacatgtcgactttagctatttaccaggtaagcaaattttgcatgatgtgaatatcgaagtggataagggccaaatgattgcgttggttggtccaactggttctgggaagacaaccgtcatgaacttgatgaatcggttctatgatgttgatcaaggcgcagtcaagattgatgacattgatatccgtgaaatggatttggatgcattacgctcgcacgtcggcatcgtgttgcaagaatccgtgcttttctcaggaacgattcgcgacaacattgtcttcgggaaacccgatgcaacagatgaagaagtggtggtagctgcccagcaagcccacattcatgacttcattatgacgttagatgatggttatcaaacggctgtcagtgaagaagataacatcttcagtaccggtcagaaacaattgatcagtatcgctcggacgattatcaccggtccagcgctcttaattttggatgaagcgacaagtaacgtcgatacggtgactgaaagtcatatccaaaaagcgatggacaacgtcatccaaggccgaaccagtttcgtgattgcccatcgtttaaagacgattctcaatgcggatcgcattatcgtcctcaaagacggtcgcatcatcgaagaaggcagtcaccaagaattactagacgaaaaaggcttctacgccgaactgtacaacaatcagtttgtatttgaatagagtgcgacagcgagcgtttatattttgaggactagcctagtcagtcaaatgaccaatttattggccatttaattcaaccggcaacttgcccagtgcgctgagcgtcaattgatgcgttgcccgcgaaatggcggtatagaggcggttgcggccgacagttggctcggtataataattgttagtcagatcgtacaacaaaacgttatcaaattctaaccctttagccagcgtcagcggtaaagtgaaggcgccggtttcggggagattcgtcgtttctgtggataagtggtggacatttttgaggccagttaactgctcgtcaaagtcaccagcaggcgtgatgatggctaaggtttggtcagttggtagttggtcaatctgagcttggatttgggtgaggtagtcgttaaaatcagtcgcacaaatcgtcgttggccgcttgccggctggttgaacggcatggacatctgttaaatcggtgaatagttgactaaataacgtcgtgattgcaccggatgagcggtaacttgtgcgcagtgccgcagtttgtagttgtggaaaaatggtgggtaattgttcgaattgtactttatgcggggtgatactttgatgctgatcaccgaaaaccgtgaactgtgctttggggaaaagttgtttaaaaagagataacgtgcttgcgtgatagtcctgcacttcatcgataaagacctgcttaacgtttgggaagacgtgatgcgttaaataagcataaatctgagctgcaataacagcatcaatcggtgtttgacgggcaattatttgatcaaaagcaagccattgataaccgcttagctgatcagctaagtcttggtaatcatgacgaatcattttgcgtgctagcggtgctagtggttcatcttcgcgaattaagcggtcgaataagcgctgttgctcggtttcagtgaggctttcaagtcgagttaaagcatctgctgattgggcttcatttgtgatgctttcctgtagacaacttgtgagttgttgctgagttgcttgtattcgtttatcaagcgggggatccaccggtgtttttaagaagaattggtagcttgttgcggcatcaatcgtcagcggtaaaccagggcttaaagattggaaatcgctcgcctgcaacgttaattgtgtgatggtcaaagtagctggttgatcagcgatggggagtgcggctagatcagaaggtaacaattgcgccaatagttgttgtagggttaagttgactggtgtttgttcacctaagtctggtaaaacttgggcgatatagtcttgaaataggcgattaagtgaaatcatcaggacttcgttcaatgcgagttctttgcgttgccgatagagtagataggcgatgcgttgaaaaatgaccgatgttttaccactgcccgcaatcccatcgatgagtaaatggtcagtcgtttgttgccgaataatcgcgttttgttccttttgaatcgtcgcggtaatggcgctcatttgcgttgttttggcttcttttaaagtggctaataacaagggatcttcgatggcaatctgcgtatcaaagaaatcgattagctgatcagcttgaatttggaactggcgccgtcggtcgagattgaccgcaatggcgcgaccgttagcttgataactggtggggccgaatgtttgctggtaataaacatcggcgataggtgaacgccaatcgtaaatcacaggatcgccggcttggtttgtgaagctagctgaaccaaggtaaaaatcttcggcgtctattccctcaggaaaagtcagcgtgatttttgcaaagtagggttgctctaacagccgtaaggtctcatcatgacgtgcaacgagcgaatcggttttcaggttgagcatatcgatttccttgttgatactttctaaagcagcgaatgtatcaagattatcagcgtatgaatcgaaattgagtttggcttcaccggtgatctgcgctttgatggtgttgccgtttttctggttttgcgattgggtatcattgatggccgtcaaagtggtggttaattgttgataaacagtggatagatgcgcttgttcttgattgaaatcagtcgtcattcaaacagcccctttacaaagttgttcccctagtttagcaagcacgttcaaaaaaggagtgcgtcatcaacgggtagcttctgagcatttgcctaacttagcgaattggcgctgcaagcaccgctttgctaagtgtagcaaagcacaggaagctgttgatgaaagcacgttcaaaaaaggagcactgactgataagtcggtgctcctttttgcgttagtctgcttttatgatggtttcaattagatcaaaaaatccagctgcatcaacgtcgtagacgagtttagccggacgtccgtttttagttaagaacgtgcgcccgccggcaattccgtttggaatgacatcacatacaatggcttttgttttaacgattgttggatcaagaaggtaacaagttgttaaaacgtcccataaataataagttgaattagttttgaaatggaccagttgaggaacaaaggcgtaacaggtgccgataaagtccatcatggcattggcacgtttgctagcccaacgttggcgaatcgccggcgttaagggaacattattcgtactttcgagcccgactaattcaatagggatttgtgtgtcgaagacagttttcactgcttcgggatcccagaaggcattccattcagcagtaccatcagaatcgggttcagcaacgttgccttgttcaagaaaagaaccgcccatccaaagaagtttagcgattttatattcgatgcttggattgatggcgagtgcgcgtgccaagtcagttaatgggccggtaaagagcaatgtgacgggttcggttgcttgattgagtttagtgattagatcgagatgtgcggcttcaggactcagaggcgtttgaacggtgccacgttcatttagcacgggaagtgcatcgactgagtaagcgtcagttcgccattcttttggaaaaggatggactgcgcgtgagtcagaagcggccacagctaaccgcgctgattgatctgaaaacgtatcaatgattttacgactcgcgctaacggctggttcgacatatgaatcagcgccaattacgccgacgccaagtagtttgattgtcggcatttgtaggagcagagttaatgaaatcaaatcatcaacaccgccatcgtgattaaaatagacttgtgtttgcatggttcgcctcctgattgttcgttagttatcaattaatattagcattatctatatttcttagcaacaaatacaatataaacgaacaatattttataaaatgaaataaatgtattgattttatgtcgataacgtgtttataataaattatcaaatttattgacggaggcttatttcatgaaaaaaagtttggtcgtacttttctcgacagtccttgtattaggtggcgtgttagccgggtgcgggagtcaaaagacagcatcaaagaaagcaacgcacacagccgctttagtcactgatggtggtgggattgatgataaatcttttaaccaatctgcctgggaaggtttggaaaaatggggtgctagtcatgatcttaaaaaaggggtcaatggttacaattacgcacaatcgagttctgatgcggactttttcccgaacattaataagttaatcaaggcaaaataccaaacaatttttgcgattggctataagttagataacgcggtcagccaatctgcaaagaataatccaaatgttaactttgcaatcatcgattcaaacgttaagaatcggaaaaacgtcgcgtccgtcaattttaaaacagaacaatcatcattcctagccggggttgccgctgcgaaaaccactaagacgaataaagtcggctttgtcggtggaattgatagtgccgtcgtgaaaacattcgaagctggttttaaacaaggggtgaaagccgttaacccagcaatcaccgttgatgtgaaatatgctggttcatttacgaaagccgatgtcggccaatcattggcaaccgcgatgtacaacaacggcgcggatgttatttatcacgctgctggtggcactggcgctggcgtctttaccgctgctaagaacatttctaagggtggtcaaaaagtctgggtgattggtgttgatcaagatcaaaaagccgatgggaaatatgatggtggcaacgtcacattagcatctgccgttaaacaagttggcacagcagtggaagatcttgctaaccaagctaagaatgataaattccctggtggcaaaaccgtcacatatgatttgaaagacaaaggcgttgccttagtgaacgacaatgcttcccctgaaacatggcaagcagtcaaagaatatcaacaaaaaattgaatcaggcaccattaaagttgctgcagaataacgactattgaatgctaaaggatggcagcagttatcagccatcctttttgtatgcttaatgaatggagcgtaaaaatggcaaaaactgtgatagaaatgcagcacattacaaaacggttcggcgcctttaccgccaatgatgatatttcattaaccttgcaacagggtgaaatccttgccttgcttggtgaaaatggtgcggggaaatcaaccttgatgggtgttttgaccggacaattaaagccgactgcggggcaattactggtgaacggacaagcagtgaccttaaatggccctcgacatgcaaaagccctcgggattgggatggtacaccaacatttcatgttaattccggcttttacggtcttagaaaacattatcctgggtgacgaaccaactaaacagggccggattgactatgcaacggcgcggcaaaaggtcacggctttagtcgataaataccaactggcgctcgaccttgatcgaaaaatcgctgatatttcggtcgggatgcaacagcgggttgagattatcaaggcgctttaccgagaagcaacgacattgatttttgatgaaccgactgcagctttgacaccgaatgaaattcaagccttgcttgccatttttgagaagttaaaggcggaagggaagtcgttgatttttatcacgcataaactaaaggaaattaaacaagttgctgatcggtgcgtcgtgattcgtgccggacgtgtgattgatacggtactagtcgcacaaacggatccgacaaaattagcggaaatgatggttggccgtccgcaacaagcccccacaccgaaaatggctaatcaaggcgctgtgatgctatcggtggaacatgtcgctgctcgtgttgctaaacgcactgttctggatgatctgggattgaccgtgcatgcgggagaaattgttggaattgctgggattgatggcaacgggcagagtgagttaattcaggttttaaccggacaattaaaaccgcagtctggaaaaattgaattagcaggtcagtcattattgaaacggacaccacgccaaattagtgaacaaggcttagggtgcattccagaagatcgccagaatatcggtttgattttgccactgtcgattgctgaaaatttagcgctgaaggattattaccatcaaccgtatagtcatctaggctggcttaattatcgggtgatcaatcaaacggcgcagaaactgattaaacgattcgacattcggacgcaatctgaacaaacgcttgccggagaactttcaggtggcaatcagcaaaaagtggtggttgcgcgcgaaatcgccaaacaaccaaaagtcttgattgctgccaatccgacccgcggtgttgatgtaggtgcgattgaatacattcatcagagcttgattgaacaacggaaccaaggctgtgggattttacttgttagttttgaattagatgaaattttaaagttagctgaccgagtacttgtaatgcacgccggtcaaattgttggtgaagttgatccacaaaccacaacgagtcagacgctcggattattaatggccgggcaacaaccagtaggagggcgagacgaatgaataaacaacaatcttcaggattaatcattgcaatcctatccgttgtggcgggactgttagtgggcggagttgtgatgttggtttttggatattcgcctattcaaaattacagtaacctctttaatggcgcattcggcgatatctattcgattggcgagacattacgcaatgcgactccgttaattttgacagcccttggcttttcaattgcgagcaaagccggctttttcaatattggtgggtcgggtcagctattagtgggctggtttggcgcgattgtctttgcactccactttaaaaatttaccggggattctcttgattcttggcgcgattttagcggggatgctgctcggtggcttttggtcttggttggccggttttttacgggcctactttggaaccagtgaagtgatcacaaccatcatgttgaactacatcgcattgtatttcgtcaattttgcgattaaacgttggttggcgccaaaaggcagcgactcatcggccaacattgtccctaaagcaagcttgcggaccccttttttggaacagattaccaatcactcaacgtttcactggggctttttcatcgcgttagtcttggtgattgtgatgtggtggtatttgaaacggtcgaagactggatttgaaattaaggcagttggattgaacgaacaagctgcacgttacgcggggatgaatacgaaacaaacgattatgtgggcaatgctattatctggactactagctgggttagcgggggctgtcgatggtctagggaattatcaaaatatttccgtttcaaatgccttaccagatatcggctttaatggaatggcggtcgcgttattagcgaatgggcatccaatcgggattatctttgcggcgattttattctctgctttacagattggtggcttaagcatttccgtctactcaacaactccgacagaaatcgtcaatatcgtgattgcatcgattatcttcttcgtgggtgtgcgcttcttatttgaacaattactcaatcaccgcttactgaaaaaacacgcgttgatgaaagagaggcttgaaaaataatgacaatcacaatgattttaatgacgatttgtgcgaccacgttagtttacgcggcgccattgatttttacagccttgggtggtgctttttcagagcatagcggtgtgattaatgttggtttagaagggattatgattgttggggctttcagcagtgccgtctttacccttcaatttagtacggtttttggcggattgacgccgtggattgccttattggttggtggactgtttggtgcactgttctccttattacatgctttagcgaccgtaacattgcgcgctaatcacattattagtgggacggtgttaaacctattggcgcctgcattgtgtgtcttcttaacccgtgtgctgtatagcggtaaggggcaaacgccggtgattaatcaaagcatcggtaacttcacattccccggcttggcccaaattccagtgattggccccattttatttacgaagacgtcgttagtggcttacgctgcggttttggtcggcattatcagttggtatgtgctgtataaaacgcgatttgggctgcgcttgcggtcagtcggtgaaaatccagccgcagccgatacactgggcatcaatgtgagtcgttaccggtatatcggggtcatgttgtctggtttgttaggcggcattggtggcgcggtgatggcgcagtcgattacgttaaacttcagcgcagcgacgatttcaggtcagggcttcatggcattggcggcgatgatttttggtaagtggcatccaattggcgcgacaggtgcatcgattttcttcggactcgcacaaagtttgccgattatcggcggctacatcccaatactggccggtgtgaatagtgtctggttccagattgcaccatacgcgattacgattattattctggtgattttcttgggcaaggccgtcgcaccagcagcggatggcgaaaattatattaagagtcattaaaagatcattcaaaaaggcgaacacaattgcttgtgttcgcctttttaggctaatcctcagcggataaccatttgcagtcgcacgctattctaagtagtcctcttttaattgtttgatttcttctggtttgagggccattgcctttgataggtagttttcgatgttgccgtattcttgattaatcgtgtcgcggacaagttctagattagcctgtgtaatgctcttagcgttcattgaagcgacctggctatcgttacttgaaattcgggttggggttgctgagctgagtcctaggacctcatttgagaggacatagtcggcaacgattgttttccagtcgacgccgagagcacttagaattaaaaaagttgcgacaccagtgcgatctttaccggctgagcaatggtaaaggactgcaccgtttgtatcgtgattatttaatagtacggtaaataaatcgcgataagctgcttgagcatgggagtcggtgaccaattgttggtacatccggtccatacttgatcgttcgggagtagcagcttcttttttaccaaaaagccgcattaggccttttttggctggctttttaggggtatcggcttggtcagtgaatggaaataccgaaagacgatggtaggttagttggttgtcatcaaatgggtcgggggcgaccttgatttcatgacgtgaacggaaatcgacatcgtaagcaacaccgtaatttaagagatcctcaatatcagttgcggttagcgcgttcaaactacctgaacgtaataatttgtgccatttaacggacttgccatcaaccgtttggtaaccgcctaattcgcgtaggttataacttcgtgttaaatctagaacccgttgttgttcttgcatgccaatccatcctttataatcagttatttctattgtataacgaagctgggtggtgtgcacccttattttaaatgttcgtgattcattcgtacacgatattgatgaaaatgaattttcaataagagtttattgacgtttgcagaaaaatctgctaatattttatcaaattttaaactggttatcgattaaagataatacgaacaatcgatgggtcggcggttaatttagttcacaaattggaggaagattatgtctgcatgggaatcaaagtttacaaaaaaagggtttacgttcgatgatgttttattaatacctgcggagagtcatgtactccccaacgaagtcgatttaggggtgcaacttgcaaagaatatcaagttaaacacaccaattatgagtgctagcatggataccgttacggaagcacccatggcaatcgctatggcgcgtcaaggtggtttaggcgtgattcataagaatatgagtattgaacgtcaagcagatgaagtcttgaaggttaaacgttcagaaaatggcgttattattgatccattttatttaacagcggataaacccgttagtgctgctgaagatttgatgcgtaaatatcgtattagtggtgtcccaatcgtttcaaatctcgatgatctaaaattagtcggtattattacgaaccgtgatttacgttttatctctgatttctctgctgaaatcggaaccgtgatgacgcacgaagcacttgtaaccgcacctgtcggcacttctttagaagaagctgaacaaatcctccaacaaaacagaattgaaaagttacctttagttggtgatgacggtcgcttagccggattaatcacaattaaggatattgaaaaagtgcaagaattcccgaatgcggctaaggatcaatatggtcgcttattagttgctgccgctgttggcgtcacaagcgatacttttgaacgggctgcagccttattgaaagcaggggctgatgcgatcattatcgatactgcgcatggtcattcagctggtgtgttacgtaagattagtgaaattcgcgaacgcttccctgaagcaaccttgattgctgggaatgtcgcaactgcagaaggcacaaaagccttgtatgatgctggggttgatgtcgttaaagtggggattggccctggttcaatctgtacaactcggattgtggctggtgtcggtgtaccacaattaacagccatctacgatgctgccagtgttgcccgcgaatatggcaaaaccatcattgctgatggtgggattaaatattctggggacatcgttaaagctcttgcagccggtggaaacgttgtgatgcttggtagtatgttagctgggactgacgaagcacctggcgaatttgaaatctatcaaggacgtcgtttcaaaacataccgtgggatgggcagcttggctgctatgtcgcatggttcatcagaccgttacttccaaagtggtgtgaatgaagccaacaagttagtcccagaaggcatcgaaggtcgtgtggctgccaaaggcgcactcggcgatgtaatttaccaattacttggtggcttacgttcagggatgggctacgttggtgctgctaatttacaggacctacaagataatgcacaatttgtccaaatctcaaatgctggtttgacagaatcacatccacatgatgtgcaaattaccaaagaagcacctaactattcagcacggtaatttaaatcatttctatcagggtttaagtcgagcgttttgcacgacttaaatcctttttttgtggttaaatgatggggaggatttaaagaattctttaaccctaagtagaagatagtttgttacaatgaaagcgaatcatgcaaaatgatgttaaattaaacgaggtaacgattatgaaaattctaattgtagacgatgataaagaaattgttgaattattaagtatttatgttaaaaacgaaggttacgaacccattcaagccttcacgggtaaagaagccctgactaaaattgccacgaatcccgatattgatttgatgatcttggatattatgatgccgaatatgagtggtatcgaagtcattaaggcggtccgtaaggattcacaagtgcccattattgtggtgtctgccaagacaactgatatggacaagattcaaggcctcctaaccggtgcagatgactacgtttcaaaaccattcaatccattagaagtgatggcgcgggtgaagtcattgttacggcggagccaacaacaagtggccaacgaagtgccggatgtcttagaagttggtccgcttatcattaagcgcgactcacatgaagtgacgacgattaataacaagcaaatccaactcaccgcacttgaatttgggattttatacttacttgccagtcaccccaaccgggtcttttcagcggacgatatttttgaacgggtctggaaacaagaaagtatcgtctctgccaagacggtcatggtccatgtaagtcatttgcgcgacaaaattgaggaagcaaccgatggtgaaaaagtgattgaaaccgtctggggtgttgggtataaggtagaagtttaatggctgactatcaaggagaaaagaacctgcaaaaagtggcactaaccgctaaggaaaagagcgaactctttgccgagggtatcatcacggttattttgttattactattaaatttatcaatcatggtgctgttacaacaggcgattgtgaataatccgcaactaagcggcggcgtatggatgattaaaaacgccattacaattggtccgaatgaatcgcatatttggagttggcaaaattggtttgtcatcttgatgggggttgccgatgtgttagtcgtctattggcggcttattcggcgttaccatcaaatgcagatgtggcacgtgattggtgagttgcattacattgccgatggtcatttggaccaccggattaatttgcgtgtcaaccgtgatttgcaacgcgtgatcgatagtgtgaacacgctggttgatagtactgtgcgttcaatggaagaagaacgcaagattgaaaagagtaaggacgaattgattaccaatgtcagtcatgatttgcggacgccgctgacttcaatcatcggatatcttggtttaattgaagataatcagtatcaaaccaaggaagaactaaccaaatatacgcataccgctttcgtgaaggcgcaacaaatgaaggtcttagtcgaggatttatttgaatacacgaaggtgcggcaaacatcgacccccattaccaagacaacgtttgatatggagcagatgttagatcaattagcggccagttttgagttagaagcgaataagaaggggatgcagattaatgtaacttgtaatcctgcaccactgatgatggaagccgatactgaaaagcttggtcgagtcttcaataatttaattgctaatgctttgaaatatggcaagggtggcaaacaaattacgttggcggctgagaaaatcggccaagaggcgattattaaagtgtcaaatgatggtcaacaaattccaagtgattcattgaaccaactctttgaccgcttttatcgcgttgaagcatcgcgttcacaagaaacaggtggcactggacttgggttagcaattacccaaagtattgtcgcgttacatggcggttatatttatgctgattcgacgccagaattaaccagctttgtgatacacttacctttgaagttaggtcggcggattgatcctcaaactgctggcgcaaaatcagttaaggagtaatgttgtgtttaaaaaattagtacaatatgtaatggtcgtattggtaattgcacccgtgggcggtcttttgagtgcccagactaccaaagtcgcagcggcaagtacgccggtgagtttgccgaccgcccctcaaatcgatgcgagtgcagcaattgcgctcgacccagcaactggacaagtcttatacgaacaaaatgcggatcaggcgttgccaatcgcttcgatgacaaagatgattacagcctacatcgtgttagcgcaaattaagcaaggtaagttaacgtgggaacaaacggtgaagcccgatgacctcatttatcaattgagtcaaaataaggatttaacgaatgtgcctctacaagcggacggacaatataccgtcaaggcacttttccaagccatgatggtcgcttcggcgaatgatgcagctatgatgctcgccaaccaagtggccggttcacaaaaggattttgtcgatttaatgcggcaaaaagtggcggattggggcattcaagacgcacaactttattcagtgtccggcttgaacaatgaattcctcggcgctgaagtttatccagacagtccggctgatgctgaaaatgaaatgagtgcggcagatgtcgcacttgtagcgcaaaagttgttggctgattatcctgaaattcttgaaacaaccaagcaagcgcattttacatttggcgcccaaacaagtgatgaaacggccatgtcaacgtggaacttaatgttacctggcgaaaataatgcaccgcaagactacgtggtcgatggtttaaaaactgggacaacggacaaagcaggcgattgttttaccggaactgcgacgaaagatgggcaacggattctaacagtggtgatgcatgccaatggtgaagatactggccggcggttcattgaaactaacaagttaatgcaatatgtcttcgatggttgggaacaaaaacaattagcacaagccaatcagagtctcgcaccttataagacagcgacggttaaatatggtcgccaaaagacagtgcaattgattacgaacaaagctatttcaatgtgggtgccaaaaggaaccacagcagccaacattgactggcattaccaagcagtcaaaggtggtgcaaaacgccaattggaagcacctattaaaaagaatgtgcaaattggtcaagtgatgccacaattgaacggtgtcactacgcggtatatcggacaagcgccacaatcacaattacgcactaaaacggcggaccccaaagccaatttatttgttttaatcggtgaagggatcaaagaatttttcacgaacctattttagttggaattgaaacgcgacacttaacggtggcgcgtttttttatggctacgattataagccgtttcaagcgcagcatgattaaatcgtgctataattaaaaccattcacaaggattttgaggaggacgaaaatggctttaacattagatgcatgtacgttaattctaaaagagcatcatttattgaaaagtgtggcgcttaatggtgacccgactttaaatatgaccggaatcgcgtatgattcacggcaggtaactgaggacacgctctttttctgtaaagggaattttcgtcccgtctatttaacaaatgcaaaagaattaggggccgtaacatatgttgccgaacaagcgattgttgaaggcaacgggatgaacgccttaatcgtcacgaacgtccaaaaagcgatggcggttttatcagcggctttttatgattacccacaagatgatttatttatcgtggcttacactgggaccaaaggcaagacaactgcggcctactttactcaatcgattttacaagcggcgacccgtcaaaaaacagcattattttcaacaattgatcgtgtcttagggcctaaaccagaggatcgcttcaaatcgaatttaacgacaccagaaagtttggatttattccgcgacatgcgcaaagcagttgaaaacgggatgacgcacttagtgatggaagtttcgtcacaggcgtataagaaaaaccgagtgtacggcttaacgttcgatgttggcttcttcctaaacatttcgcctgatcacgtcggaccaaatgaacatcctaatttcgaagattacttacactgcaaattacaattattggtcaactcacgacactgtgtgattaacgcgcaaacgcaatattttgcggatgtgtatgctgcagcaactacgacgactgctccggaatcaatttacttatttgccgaaacggattatcaacctacaattccggtggcggttgatttccgctttgaaaatctagaaacgggcttagcagaaagtcggtttaaagttaccgcggcttctgaacgagccattcaacttggtgtttctggtgattaccaactgcgtttaattggggatttcaatgaaagcaacgcgacagctgcagtgattggtgctggtttggcaggggcggatttaatcgcagctcaacaaggaattcgcgacttgcagattccaggacggatggaaaccttagccgttccaggacatggtcaagtatatgttgattacgcgcataattatgccagcatgaaggcgctcttgagcttcttgcaaaaggaatacaatcaaccacgcctactagttgttgtcggtagtcctggcgataaaggtgtttctagacgtgctgggtttgcacaggtccttaatgaatatgcagatcgggccattttgacgactgatgatccgggatttgaagatccagcagccattgccgctgaaattttggcagggattgaccaggataaggtgacaaccaccatcgaaattgatcgtgcaacagcgattgaacaggtgattacggaaagtaaaccgggcgaaattgttgtcttagcggctaaaggggccgatgcttatcagaaagtacgcggggtcgatacaccatacccaactgatatggtgattgccaagcaagtggctgctaagttaagctaatcagcgtgtttcttaaagatttttaaatcagatgtggatttaattgctattctgaggtgggtctcgtagaataaagatgaatcaataggagttggagggggtattatgaaaaagatggttacagttagtacagttttggtatcaggactactattattaggggcttgtggtcaaagtagtacggcaaatcaagatgctgatgccaagcaaagttcaaccacggctagtcttaaagcacgtgaaagtagcgttgcaaaacgcgaaagtgaactttcaagtagtgcaagccaattaaaagcgagctccaaagcggcgctggcatcttcaactgaagtagagtccccacaaggaagttcatcaactgcaagtgttgctgaatcatcatcaactgctacaacggcaagtagcagtagtcaatctgcgagccaatctagcagcagtgcaccaacaacgactaccacgacaccacaacaaacaactgccgtagatggcaaccaagcgattaaattggtggttcaacaagttggctcacaatttggtcaaaccgcatcgtatttgaataatggcttaatcacacgcggtgggcaacaaggctatctcattaatatttacgtaccaaacgaagatcaaccacgggcaggttattttgttgtccaagcaacaggtgcagtggaacaaatctggtaattaaagagtgtggcgtaagtcgggatgctccgaggattaacacagagcgtgaataattgtagtaattgtttgcgactcagggttaaccggaggagaatgacttacagaacacgtttaaagttcaataattcaaaaaaggggttagggcaaaagcaatctttgtcccaatccctttttaagtgttttcagaaaaatgattgacaattagtgagactcgtgtaaaatatttttagtaaaacgtaataattacgatttataaaagaggagaaaaagatgcgtaaaaaaggtttggaaatcatggcgggaatcttactgctaatgctattagtggctggttgtggtcagagtacgaaaaaggcgagtgggattcaagttgtatcgtcactcgatttttatggtgaggccgcacaagcggttttaggtaatcaaggtcacgtgacgtcgattatcaatagtcccagtttagatccacattcatacgaagcaacaaccaatgatgctaaactcgtggctaaagcggatgttgtgattcaaaacgggcttggttacgacagctggttaaacaaagtcgtcaagagtgcccaaccagatgaccaaactgtgttgacagtcagtcaattaatgaaacaatctaatggcgctaacgaacacttatggtatgatttaaagacgatgccaacattgactaagcggttagtgactgaatttagcaagcgcgatccgaaacataaggcaacgtatcagcaaaatggtgcggcgtatcttaaaaagttagcttcgttagacgcacaactccaacaactaaaggcgcaggccaaaggaaaacaagtggctgttagtgaacccgtttttgactatgcattggctgaaacgggttacaaagtcgctaaccaacactttgccaaagcaattgaagatgggaccgatccatcaccaaaagatattacaacgatgcgggatttaattaaaacccatcagattgcctttttagtgattaataagcaagaagaaagtcccattattaaacaaatgcacgaactagcggataaagaaggggtgccagttgtacaagtaactgaaacactacccgctaaaaaaacatatttaacatggatgcaacagcaatttgatgcagttagaaaggctcaggattcaaaatgacagaattagtgaatgcacaacatttagggcttgcctttagtaatcgacaagtactaaaagatctcagttttacgatcaaacgtggtagcatgacgagtttaatcggtccaaacggggttggcaaaacaactttggtgcgcctattaatcggtaatttacaaccgacagaaggacaactcgtttttaacccggataagcaaaagctaaacatcggttatgtgccacagtttagaaatttagaagctgaatatccgttgtccattcgtagttttgtgagtttgaatcaacttgatagccacttaccgtggaaatcgcgcaaagaacgccaagcgcttgatcaaattttagaacagacccatctaaccgcgttgcaaaagacgaccatggggaatgcttctggtggtgaaaagcaaaaagcgtatttagcccaagcattaatcagtaaaccagacttgttgattttagacgaatcgacagcgagtttggatattgaaactaaagaagaagtgatggccttggttgcagagttgaaccgggaacatggtttgacggttatttttgtgacccacgatttagaattggcccggaaatacacggatcaatacctatttttaaaacgaggtcaatatgaagccggaccaatgagtcagttggatcccaatttggaattagattaaagcggaggataagcgagtgttaacttttgattttatgcggcatgcctttgtcgccagtacttttatcgcaattacctgcggtttaatcggggtatttgttgttgcgcggaacatgtcatttctagcgcataccctatctgaaattggatttgccggagcctcatttggggttttcatgggaattgcaccattgaatgggatgttattgttcacgttactcagttcaatcacgattggtcagatgagtgccaaagaatcacggcgagaagcgtcgattagtgcgatttcaagtctgtttgtcggtttggggattctctttttatccctttcaaaccgaaatgctagttatgctaccaatattttatttggttcgattattggcattagcttagcagatgtttatcaattaatcatcttatctggggcaattatgattgggctgttgatcttttaccggtacttggtatttgattcatatgatccgattggcgctcaagcacaaggtttaaagaccaacttactatcgatttatttcttaattttattagccgtcagtgtcagcattgctgctcagattgtggggtcattactagtattcatcttagttacgattccggcgttcattgctaaatatttagcgaagagcgtacccgggatgttggcaatctcggttgccgcagcgttattaggggtttggctcggtttatggcttggttatctaacgaactggccagtgaccttcttcatcgccacgattgagtttggcttttactttattgcattgttatatcatcgacgaattagccgttaaaaaaacgtcctcaatcattgaggacgttttttcatgaggcttaatttaggttagcgagtagggcttcgagttgatccaggcgttcttcgaaaactgcaaaagcgcgttcgagatagtcggcactcgtcatatcgacgccggcttgttgcataatttcaattgggtaggcggagctcccagcttttaggtagtctaaatagtgattgagagcaccgggctgtttggtgctaataccgttagcgagagtcgttgcagcagcaaagccggttgcgtattggtaaacataatagttcatgtagaaatgtggaatccgagtccattcaagggcaatctgtggatcgttaacgacggcaggtccgtagtagcggctattaatgtccgcatattgttgtgacatgaactcggcagttagtggctgaccattggcagcggcagcatgcatcgcatgttcgaactcagcgaattgcgtttgacggaaaacagtgcctttaaaaccatccaaatagtagttcaatagataggcctggaccttaggatcagactgtgtttgcaataaatattccgttaagagattttcattggttgttgacgcaatttcggccacgaaaattggatagtcgccataaacataatcttgggtctgacgggtgaaggcgctgtggacactatgccccgtttcatggaccaatgtgtataagttgtttaaatcatcttgccagtttaataaaatgaagggattggtgtcataagcgccgccagaataggcgccactccgtttcccttggttttcacaaacatcgattaagcggtcatcaaaaatatgggcaacttgtttggcgtaatcgggtcctaggatcgacaatgcttctttggcagttgcttgcgcctgctcataagtgtaggttaatgcgggttttcctaaaagtggtgtgtagagatcaaacatgtgtaattcagataaattaagttgctttttgcgtaattcagtatagcgatgtaaaagtggtaagtgttggttcacttgatcaaccaaggttgtatagacggcttctggaattgctttgggtgctagcgctgcttggcgtgcactatcgtagtgatggacttgagctaagtaattatgacctttgatttcagtggcaagcgtcgtcgcaaatgtatttttgaattgaccataagttttgtaaagtgcttcgaaggctgcttggcggactgatcggttggctgattgcaaaagttggctgtagaccccgtctgaaagctgaaacgtttgtccgttttcgtcagtcacttctgggaattgtaaatccgagttgtctaagacgctgaaggtttgactagcagcactgaagatatctccggcagcagctaacaaggcttcttcttgcccagataagacatggtctcgactatcggtaatggtttgaatgaaatggctgtaaactgctaaattaggcgtcttggtaagccaatctgctaattgcccagccggaatagcaagaatcgcaggctctaaaaaggccgctgctgctgaaacttcggccgctaagctgtccacttgggcttgatagccttgataagttgcgttagcagtatcctgatcatttttcatgctagcataaacgtaaattgtttcgagctggcggaaagtggctaagatttgttcgattgtagcgactaattgatcagccgattcaaacggacgatcaagtgttttgagtgtgggtaattgcgttttaactttcttaaaggctacttcaaaagctgcatcatttttgaaaatcgtggttaagtcccatgtgagcttttctggaacagcattgcgggtggggagttgttgagttgacatatgaaccctccataattaagactaattgtttatattttagcataaaagcgcttaggaaagtgttgttcaacaattgaaggaattattaaaattgtgtaacttttcttaaaaggcgttgtttgaaatgataattccgctataatagcaacataacattattaatgccggtatgatacataatagaagggaaacacctatgcagaattctaaatttttcggatctcgagaagcaaactacaaaaaagttaaaaagcatcgcacgatgaaagttttgatactcattctaacgctagtcctcttcggtggcggcgcgtatgcattacgcatcagtaatcaagtgaagtctgcagcgaataaaatttataaaccaaatgcgactaaaaaagccgctaaaacgattaaacataaaaaaccattctctattttattactcggagtggatactggtgctgagggccgagttgataaaggaaattccgatacaatgattgtggcgacagtcaatccagataaagagcaggtcaagttggtcagcattcctcgggatacgctagcgcaattacaaggcgcagagaagttcgacatgcaaaaaatcaatgctgcctataatgttggtggctctgatatggcaatgtcgacggttgaaaagatgttcgatgtcccaattgattactatgtcacggttaacatggggggcttatcgaagattgttgacgctgtcggtggcgttgatgttgacgtaccatttacgttcgaatggaacgggagcgagtttactaagggcaagatgcatctgaaaggaaaagccgctttagactactcacgaatgcgttacgatgatccagaaggcgattatggccgtcaaaaacggcaaaaacaagttatcacgtcgatgattaattctgcagtctcgcttaaatctttgaccaactttgaatctatcttagactccttgtcagatagtgttgccactaacctcagttttgatgacatggtagcgattcaagaaaattatcgaaaggcagctaaatcaattgagtctgatgttttaactggacgtaatgctgatattgatggtagttcgtatcagattccaaccaatgaagaaatccaacgcgtttcagatgtcttgagaacgtcactgggattagagaaaacaacgattaacaacgcagaaaccaaacaaaacgatttgaataccaactttacaggtgaagaaaatcatcaagagtttacggtttattctgaaagtgtcatgaatggtgaaaagagtgctgcaacgacgacgcaaagtaactatggctactcgaacagtgcaacttatagtggtaacaacgattacagtaacaccaccaatacttggcaaatgcaacagtctacaaatcagtggaatgcgggctattaaaaatgaatggaaaagcggtcctttgcaaaaggggaccgctttttttgtggactaaattagttgcgtttaacaagtgattatttatgcaattagggggtgaacaatagtttacatttacaagggggaacggtattatttaaagcggtacgaaaaagacaaatgaaggatgtggcgtgtcgtgtatttgcttgtaaatgttgttggattactgatttttattggagtcggctttctgttctcaaagaaaaagaaagaaatcgattggcgctccgtcttaatcatgttagtgattaacttagtgcttgcttggtttttaacgagtttttcaatcgggcgggatattgttttaggtgcagcaaacggctttaactggttagtgcaagttgcctatactgggattgcttttgcactaccaagttgggtcaatgtgaaacaaatggatttcgttgctagcgtgttattaccaatcttgatgattatcccattattcgatatcttaacgtatatcggggtcttgccttgggtgattaaatggttaggccgtgggttagctaagattacgggacaaccaaagtttgaatcattctttgcagttgaaatgatgtttttaggtaataccgaagcattagctgtttcaagcttacaattgaaacaaatgaaagcagaacgaacattaacacttgcgatgatgtcaatgagctgtgtgacagcttccatcatcggcgcatatacacaaatgatgccgggccaatttattttaacggcgattccggtcaacattattaacgctattattgtcaccaatattttaaacccagtgaaagtcacacccgaagaagatacgattgctaaaatgggtgggagtggttccgcagctgttgaagcaaccgaaatggttgaaggcaaagtggaacgtgaaccattcttctcattcttaggtgattcaatcttaaatgctggtaaattagttctaattatcacggcaaacgtcatcgcctttgttgcgttggctgccttgatcgacaaggtgcttcaattagtgaacccttggattacccttgaacatttacttggaatcgtgatgttcccattcgcatggttaatgggacttgatgtgcaccacgcttttgaatttgcacaattcatggggacgaagttggtgaccaacgaattcgttgtcatgggtaaagttcaacattcaatcgggagcttcgcaccacattaccaagctgtcttaacggtcttcgtgacatcatttgccaacttctcaacagtcggcatgatcatcggcgccttcaaaggccttgtggaccgtgaaaagaacgacatgattgccaaaaacgtcggctacatgttgctatcaggaatcttagtatcacttctttcagcagcaacagtcggactatttgtatggtaatttaaagagtgcgcaggcagtcggttatcttctgaggattagcctaatcaggcggattaccgacaaagtcggtgatttgactgatgtagctaaccggaagaagatggctgtcaaagcacgtttagagtgcgtttgatgacggttaacaactgagcattaatacaaaattcccaataatccgggtttttaggattattgggaattttagattaagcggaaattgttgtcatcaaaagcacgtttagattgtgtcattaacgggttgtttttgagcatttgcctagtgttgtgaataatcagcgcagctgattgtttgcaatacgtagcaaaacgcagaaagcagttaatgaaagcacgtttcaattcaatcaatttacggcgccaacttaatcttggtgccgcattattgggctatggccaagcggtaaggcaacaggttttgatcctgtcatacgctagttcgaatccagctagctcaatccaactgcaaaacttgacggttaaagggctttgtgatatattttggacattataataaaatgtagccatcgataaagtacttggttttagcgatcaatcacagagagagtaaccccgttgaaagttacttattgatttcagttgacagcttttgaggcttggatgaatatcccgctagcagatagcgttatcaacagctgaaattaaaggtggtaccgtgcgcaaagcacccttgtcgaaagacgagggtgctttttttattttttataaaatgtagattcagagaggattggcaaatatgagaacaagaacaacatattgtggattagttggggaagaatttctcaaccaagaagtcgtattacatggttgggttcaaagccaacggaattttgggaacttaattttcgttgatttaagagatcgcgaaggcatcgttcaattggtgtttaatcaagacacagatgcagatattttccaagtagcaagtaaattaaagagtgaatatgtcgttgaagtccaaggaacagtgatggcgcgtgatgaagcggccattaatccagacatgaagacggggaaaatcgaagtgattgttaaagacttagtggtcttgaacaaagctgaaaccctcccatttgaaatttcagataacaatacggcttctgaagatttgaaattgaagtatcgttatttggatcttagaagaccagaaatgcaaaatgccattaaaacacgggctgcgattactcgtgcagttcacagctattatgataacaatggttatttaaatatcgaaacaccgaacttgacgagttcaacacctgaaggcgcacgcgattatttggtgccttcacgggtttatccaggtagtttctatgcattaccgcaatcaccacaactcttcaaacaattattgatgtcagccggctttgataagtactatcaaattgcccgttgttttagagacgaagatttacgtggggatcgccaaccagaatttacacaaatcgatgttgaaacaacgttcttatcagacgttgaaattcaaaccgaaacagaaggtttattgaaaaaagttatgaaagacgtcaagggcatcgatgtgcaaacaccattcccacgtttgaaatggcaagatgcaatggacaagtatggttcagataaaccggatgttcgttttgatatgcaaattcaagatattacagaaatcgtgcaagattctgacttcaagccattctctgaagctgttgaagcgggccaatatgtgcgcgcaatcgtcgttaataatgccgcccctaaatattcacggaaagcgttagacgaacaacaacaatacattgaacgttacggcgctaagtcattgttgtgggcgaaatacgctggtgataaattatcaggggcttctgctaaaggcttattaccttaccaagaagcgcttgttgaacgtttgaacttaatggatgatgatttaattttaatcgttgccggtaacttccacgtggtttgtgatagcttaggttacttacgaacacacttcgctaaagaaatggatatgattgataagagccaatttgcatttacatgggttgttgattggccattatttgaatatgatgaaggctttggcaaatggattgcagcccaccatccattcacgcgtccacgtgatgaagatattccattgttggatactgatccacataaggcacatgcaatttcatacgatatcatcttgaatggttatgaattaggtggcggttcactccgtatttttgatccagaagtccaagaaaaaatgttatctgttttaggggttgcccctgaagtggctcaagaacgtttcggccacttattaaatgccatgaaattcggtttcccaccatcaggcggcttagcaattggtttggatcgtttcgcaatgttgctcgctggtcgcgacaatattcgtgacgtgattgccttccctaaaaattcccgggccacagaaccaatgaccaatgcgcctagtgaagtgacaccggaacaattagaagaattaggtatcgaagtgaggcctcaaaagaaggactaaccagcatcaaatgaagtcaattaagtaaaggagaattgccatggaagaaatgtttacgattttaggcggcatggggacggcggcaaccgaaactttcgtacatctaatcgatgaattaacaccggctaagaaggatcaagattatctgaattacgtcgtgttcaaccacgctgaaattccagatcgcacagcctacatcctcgacaacagccaagaaaatccgttgcccgtgatgttaaaagatattcgccaaatgaatttgttagcgccgaagttcatggtaatgacctgtaacacagcccattacttctacgacgaattacaagctgccgcagatttcgacattatccacatgccacgggaaacggtcaaacacatgcaacaaacaattcccggcttgaagaaaatcggtgttctcagcacaaccggaacccgacaagccggtatctatcaaaaagcaattgctgcttttggtcttgaaagtgttgttcccgaccaaacattgcaagatgccacgatgagtttgatttatgatgacattaaggcgactgggacattcagccaggacaagtatcaaaaaattgtcgatacaatgttaaatgactatgattgtgacgcggttattttgggctgtaccgaattgagtgttgcacagtcggaatttccattgtatcccgacaaagtgattgatccgatgacagtggtcggccaaaatattgtcgacgggctatacaacaagtagcaattactaattaagttttaacaaagagcatcctgagctgacgtatattgaacggcagtctggtatactacgataaatattgatatagaaggtgacagcatgcaagcaaacggtaaaaacttcacccccattttattggggagcgattttaacgtttacgggatggcccgttcgttttatgagatgtatcatgaacctgttaaggcctacgcaagtcaggaattagcaccaactcggtttacaaaaatcgtcgatttagaattgattccaggcttcagtgaagaccctggattcattactgaaatgctaaaattaaaggaaatctatcgcgatagcgatggcccagtcattttgattggctgtggtgatggctatgcgagcttaatttcacaacataaagcggaattggaagatgtctttgtttgtccatatattgatcacgatttactagaaaagttgacttataaggaaaccttctatgaaatctgtgacaaatatgacttaccttatcccaagacgcacatcattaccaagcaaatggttgaagataatcaggtggaacaacctttccaatatccagtggcgttaaaaccggcggattctgtggaatggcttgatgtgcattttgaagggcgcaaaaaagctttcacgattaaaagtgaagctgaattccaagacatcatgcgaaaagtatatgaaaatggctaccaatcagacatgattttacaagacttcattcctggggatgacagtcggatgcacgtgatgaacatctatgttgaccaacaacatcacgtgaagatgatgtgtctgggccatccattattggaagatccagcacccgcagctattgggaattacgtggcgattttgccggaatacaacgcacaaatttatcaacaagtccaaaaattccttgaagatatcgagtttacgggttatgccaacctcgatatgaaatatgatgaacgcgataacacctacaagttattcgacatcaatttacggatgggccgcagtagtttctttgttaccttgaacggctataacttagcccaatgggtggtgcgcgattacgtgacaaacgacttgcaagatgaacctgttgtttgggcgaataaagatgaagacagtcccgcactttggttgggcgtttcagtggatgtctttaagaaatatgcccgcaataatgccgaaaaagacaaggcattggcactcatcaaacaaaaacgttacggcaccacttttgaatatagcaaagatatgaatctcaaacgctggctattgattaaatggatgttgcacaattaccgcaaaaatttcgcgaagttcttcaaagaaaataaggaataacgtcgcttaaaactttaaaaagcacatcatcgttgaacgatgatgtgcttttttagcagcattagaaaaaatcccgccgcagggttgcaggtttgtggtaaatgatgcaatatgaagttggagaatcgctgtggcatttatggtttgatttttgaatgagtgctttatttttgagacaaaaacgatataataaatcaaacaataaatttacaatgctagccgttattttgactgtcaattagcgttaaagtgcttttagatgcgattatgaatgtagcaagtaattgaaaaaggtggaaaaacgatgcactcattagatattgagcgattaaaagagatgtcaaactttgaagttgccgctttgttcttagaaaattcagaaaaaaatacaatgcataatgcgccaattaatgttggtcgtggggaccctaactggattaatacgcgggcgcgattagcttttaataagcttgtcgaatttggcgtcgaagaatctgctaagaaaattaacgaggctgatggagatatggcgggctacgttgataaagcagggattgcacaacggctgcatgcctaccttgatgccagtcataaaacagatcgatttatattagcctttttagattataccgaaaagcacatgggcctcaatcaggatgatttggttcacgaatttgtcgacggtgcgattggcaatcactatccagtaccttcgagaagtttaatcaatgtggaaaaaatcctaaataaataccttgaagtgtcactatataatggtgaaaaattagctaatcaaacggatgtcttcccaacagagggcggaacagccgcaatggtttatttgttcaaggaattgaagatcagccatatcttacggcctggcgacacgattgccatcaataccccaatctttaccccttatttgcaaatcccagaattaagtgaatataaattaaagcaattcgatgtgagttccgttgaagatgacaactggcaaatgatggacgccaagtttgaagaattgaaggacccgacaatcaaagccttttttgtggttaatccaacgaaccccacttcgcgggctttcagcaaacacgcgttagctaagattaaagaggtcgttgaagcaaacccagaaattatcatcattacggatgatgtttatgggacttttgtgaatgatttccaaacaatttactcaattgccccccgaaatacgatgttagtttattcgtattcaaaactttatggggcaactgggcatcgtttaggcttactagcagtgcaccaagataatgtttttgatgaaattattgctaagcgaacggctgaagaaccagcgattaaggcagcttttgaaaaacggtactcagttgtggcgcctaatccgcttgcgatgaaattcattgatcgaacagtggctgacagtcgtgaaatcgcgttgtaccacaccgcgggattatcaacaccacaacaaattttgatggcactatttagtttgaccagcttaattcacgaaggtgaaaaggatccatacatcgaagcttccaagaaaatggttgatgcgcgatacaacgctttttgggaatcgatgggcatggaatgtgatcactctaaagaaaacgctgaatattatgcggtatttaacatctatgattttgctgaaagaaagtatgggcatgaattccacgactatttcgaaaagcacgtgagctatcttgatttcgaagataaacttgcagctaaatacggcgttgttgtgatggatggggcaggaatggggactgatgatggctacttgcggatttcattagctaaccaacccgctgaaaattatgccattactgggaaccggattgcccaattactagcagaatactatacccaatttcaagcacattaaataaaaagtaggcgctgtgaggcattttttgcaagatagtctgatccggagcgcgcgaggtgctgaggcaataaacattgtctcagcacctctttttttattggcctgcattaataattgaacatttatcgagtctgtttgtagacgacttttaggaatcatgtataataagcttgagataaaatgatttataaaggagtttagcatggccgacttagtttatcagaatattatcgcggacttaaaaaaagcgatcaacgcagaatcatttcccagcatgaaattacccgatgaacggacgttgactgaacactatcaagtgagtcgtagctcggtcaaacgtgcgttaaacgttatgtctaatcaagggatcattttcaaaaaacggggttcaggaacctttattaatccactttatttaaagggtggctcgttttttaattacaatggctctaacctaggggttaccgacagttttaaagccggtaatcggacaccggggattaaattattagatttccaagtcatcaagccgagcgcggaattgcaacgagacttgttcctgaaaccagatgattttgtttacgaaatcaagcgtctccggttgtttgatgatgaaccattcatgattgaaacgggcttcattccgattaaggtaatgcccgaattgaccgaaaaaattgtgtcgagttcaatctttaactacttggaaaccgagaaaaatcaagaagtcacacgcgctttcctgtcaattttcgcggaaccatcaactgatgatgatcaagcacacttaaagttgaaaccgacggaaccagttggcatcatggaagggattttcttcttagacgatgggacaccgtttgaattttcaacgatgcgcctgcactaccaatacatgaaatataatacattcgttacggttagcggtcgcgaatagggccgctatttttagatttaaaaaattggtacgacccaatattaaaaatggttgacttttttaaaaagtttagtatgataagagagtagtcagaaacaacaaagttgcaaaagctgcgactggaacttaaagtaaagctattaggaacttttttaaaattaaaaaggggtgctattaaaatgacagattattcaagcaaagaataccttgctaaagttgacgcattttggcgggctgcaaattatatctcagttggtcaattatacttaaaagataacccactattgaaacgtcctttggaagcaaaagatgttaaggcaaaaccaattggtcactgggggacaatctcaggccaaaacttcctatatgctcatttaaaccgcgcaattaataaatataacttaaacatgttctacgttgaaggcccaggtcacggtggtcaagtgatggtctcaaactcatatttagatggtagctattcagaaatctatccagaaatttctcaagatgttgaagggatgaagaaattattcaaacaattctcattcccaggcggcgttgcttctcatgcggctcctgaaacacctggttcaatccatgaaggtggcgaacttggttattcattatcacacggtgttggtgcgattttagataacccagacgtgattgctgctgttgttgtgggtgatggggaagctgaaactggcccattagctgcatcatggttatcaagcacattcatcaatcctaagaatgatggtgctgtcttaccaatcttgaacttaaacggtttcaagatttctaacccaacaattctttcacgcaagagtgatgaagaattaacgaaatacttcgaaggcaatggttgggaaccaatctttgttgaaggcgacgaccctgaaaagatgcacccagcaactgctgctgcaatggatgaagccatcgaaaaaatccaagcaattcaaaagaatgcgcgtgaaaacggcgattcatctcgtccagtatggccaatgatcgtcttccgcgcacctaagggttggactggtcctaagacatgggatggcgtaccaatcgaaaattcattccgtgcgcaccaaattccagtgccaattgacagtgctgacatgcaacatgttgatgcattagtagattggatgaaatcataccgtccagaagaattgtttacagaagcaggtcaattaaaacctgaaatcgcagaaattgcacctaaaggcgatcaacggatggctgctaacccaatcaccaatggtgggattgatcctaaaccattacgcttaccagattaccgtgattatgctgtggataattcagaacacggtaaagtcgttgcgcaagacatgattgttttaggcgaatatgttcgtgatatcatcaaagacaacgatcaaaataaaaacttcagaatcttcggccctgatgaaacaatgtcaaaccgtttgaaccatatttttgaagcaacaaaccgtcaatggatggaatcaatcaaagaaccaaacgatcaatacatggcaacagaaggccgtgttcttgattcacaattatcagaacatcaagctgaaggttggttagaaggttatgtcctaactggtcgtcatggtttctttgcaagttacgaatcattcttgcgcgttgtggattcaatgttaacacaacacttcaagtggttacgtaaggctgatgaacaagcatggcgtaacaagtatccttcattgaacgtgattgccacatcaactgttttccaacaagatcacaatggttacacacatcaagatccaggtatcttaacacacttagctgaaaagaaacctaaattcattcgtgaatacttacctgctgatgctaacacgttgttagcaacaatggatactgtcttcaagagccaagaaaagatcaatttagtggttgcttcaaaacacccacgtcaacaatggttctcaattgacgaagcaacagtcttagttaagaatggtttgaagattattgactgggcaagtacagaccaagatgctgaaccagatgttgtgattgcagctgctgggacagaaccaacacttgaaagtttggctgcaatctcaatcttgcacaaacaatatcctgacatgaagattcgtttcattaacgttgttgatttattgaaacttcgttcacctaaagtggaccctcgtggtttaacagatgaagaattcgacatgtactttacaaaagacaaaccagtggtcttcgcattccatggtttcgaaggcttagtacgtgatatcttctttgaccgtcacaaccataaccttcatgttcatggctaccgtgaaaatggtgatattacaacaccattcgacatgcgtgtcttgaatcaaatggatcgtttcagtctatctaaagaagttgcagttgacgtacttggcgatcaagctggtcaattcgcacaatcaatggatgacatggttgctaaacacaatcaatacattcgcaatgaaggtactgatttaccagaagttgaagaatggcaatggacaccactccgttaatgcggtgagagtgcgtcactaacggtttgcttttaagcatttgcctaatcaggcggattgccggtaaagccggtgatgtgactgatgtagcaaggcgcagaaagcagttagtgtaagcacgtttaagtggaagagtgcgtttgaactggttatcttctgagcattaactggatttgacgaattgacgatgtaatcgtcgatttggcaaatttggttaagcgcaggaagatggttcaaaaagcacgtttaaatgatagaattctactatcagaagaagggtctgggacaaacatacttttgtcctagattctttttttgtggattagtggtctctgagcctttatttttaggcataataacggtaaactagtagacaagtataattttagaaagaggcgttttttttatggcaaaaaataaaatccgagtgcggtatgcgccaagtccaacaggtcatttgcacatcgggaatgctcgtacagcattatttaactatttatttgcacgtcacaacaaagggactttcgtgattcggattgaagataccgacacgaaaagaaacattgctgacggtgaaaacagtcagttagataatttgaagtggctaggtatggattgggatgaaggtccagataagcctggtgactttggtccttatcgtcaatcagaacgtcgcgaaatttacacgcctttaattgaagagttagtggctaagggattagcttacgaatcatacaaaacagaagatgaattaactgaagaacgggaagcccaaaaagcagctggcgaagcaccacgttacatctacgaatacgaaggtatgagtgatgatgaaattaaggctagccaagaagctgctaaagcaaaaggcttacaaccagttgttcgtttacgtcttcctaaggatcacgtttacaagtttgatgacattgttaaaggtgaaatcagctttgaatcagatcgtttaggtggcgactttgtcatcatgaaacgcgatgggatgccaacatataactttgccgttgtcgttgatgatcacttgatggaaatcacccatgtcttgcgtggggacgatcatatcgccaacacgccaaaacaattggctgtctacgaagcctttggttgggaaccaccagtctttggacacatgacattgatcatcaatactgaaacaggtaagaagttaagtaaacgtgatgaatcagtgcttcaatttatcgaacaataccgcgaattgggttacttaccagaagcgatgtttaactttatcgccctattaggttggtcaccagttggcgaaagcgaattgttcaatcgccaagaattcatcaaacaatttgatccaaaacgtttgagcaaatcaccagctagtttcgatcaaaagaaactcgaatgggtgaataaccaatacgttaaacaatcagatccaaacaaaatcatggatctttcgttagaaagcttgattaaagcgggtaaaatcgctgaaaatcctgatagcaaaacgatcgaatgggcccgtcatttgattgcgttataccaagatcaaatgagctacacagctcaaatcgttgaaatgtcagatgtcttctttgaagaacctgaacaattagacgccgaagcgcttgaagaattaaataacgaaacagcacccgttgttttgaaggaattcagcgaacgcttgaaagatttaacattattcacagcaccacggattatgcaaatcattaaaggcatccaaaaagatacgaagattaaaggccgtcaattgtacatgccaattcggattgcaacgacccgcgaaatgcatggtccatcattacctgattcaatcgaattgttaggtaaagaccgtgtcctagcccaccttgaaaagacattagcagaaattaaatagagtgcgtttaaaaaagcacgtttaagaatagagtgcgtttggttgcgttcagcaactgagcattaataaaaaattggtagttatccagaattcaggatgactaccaattttttagttaactggaaaagtcagttcgagaaagcacgtttaaacgttcaaaatagaacagcaaaaaagctgaggttgaagtatttcttcaacctcagcttttttatttttgtctagtccgatcaatttcagtccgaatggctttgaaactttgttctgtttgtgggccattattaacggcgaccatcataaacagactatcgacgatgctgatttgtgcaattaacgcgtgtagtgcttcggcgcggtaattggtttcttcggaaatggacaacagtgtcacatcacccaatttagcgagggttgaattgccaaaactggtgatgacaatcagtggaacgtgacgttcttttaagatgcgtgcaatttctaaagcatctttattttgaccactatgtgaaataatcagcgcacagtcttgttcggtgagttgggtggcctgcatcaattgtagatggtagtcttggctgtaaacagttggaatcgcagttcgtaaaaatttgtggtagccatcttgagcgacgattccagaagcgcccaagccaaataaacttaagcgcttggcctggttgatataatcaacggcttgccgtaattgcgcttcagtcagtagtgaacgagttgctttgagcgcattagtattggatgcgaaaattttatcggccatggtcagatagtcatcattattactaatttcatggaagagtggattatctgttgggattgcttgtttagcaagtaacgccattttgagtgcctggaagtttgcgaaggtcaacattttggcgaaacgggaaatagtggccgttgaaacaccacagtcagccgcaaattcttgaatcgttaaactttgattgaaatgttcagtttttaagatgtaatctgcgatttgtttgtatttttcacttaaattcgtgtagtacgcacggagtaaggaatcgatgttttgtgtcattgaagtgcccccttgttatcgatagtatagcataaaaagcaactaagaaaattattttctcaaaaagggttgattaaagaaaataatttacatataatgaagacattaataaaagtgacatgaaattgtggataaggggactagcaaagatgaaattagcaatgattggtttaggcaaaatggggattaacttggtcgctaacttacgacgtaatgggcacgaggttgtcgcctttgacttaaatgaagcagcggttcaagaagcaacccgcttaggtgcattacctgcaaaggatattgatgatgtggtggcacaattgccacaacctaaaattgtgtggagcatgttacctgctggtaagccaacacaagccacaatcgaaacgttaagtaccaaattgacagccggtgacattgtcattgatggtggtaattcatttttcgaagattctaaacaacacaatgcattgcttgccgcaaaagggattcatttcttcgatgtcggaacttctggtgggatgagcggtgctaacgcagacggaaacttcatgatcggcggtgacagcgcggaagtcttcaaacagattgaaccgatttttaaagatattgctcaaaaagatggctatctctataccgggaaggctggtagtggtcattatctcaaaatggtgcataatggaattgaatacggcatgatgcaatctatcgctgaaggattcgatgtgttatcacatggtgagtttgaatatgataacgaagcggttgctaaggtttggagtaatggttctgtgattcgcggctggttgatggaattagcggaatctgcttttgcaaaagaccctaacttagaaggcttaaaaggtatcatgcactcatcaggtgaaggaaaatggacattagatgaagccttgaaattacaagtcccaacaccggtcattggtttatcattgatgatgcggtatcgttcacttgaagatgatacattcactggtaaagttgtcgctgctttacgaaatgaattcggcggccatgcagttgataagaaataagtggtatcctagtaagtagtcagtaaacaccacataaacgaggtaattatgatgaaatatatgattggttcggatattggaacaacaagtacgaaagcggttttatatgatttaaaagggaatgttaaagcttacgcaaacgttggttatcctttatatcaaaccgtacccgatatggcagaagaagatccggatgaaatttttaatgcagtgtcagaagtattacgacaggtgatgcgcaagggcaacgttcaagccggcgaattacagggcgttagtttctcggctgcgatgcacagcttgattctgatggatgcaaatgatcaaccgctaactcgggcaattacttgggcggataatagagctgctaaagcaagtcaacaattgaaagaaaatgggttgggccaagccatttatcaacacactggcacaccaatccatccgatggcgccactttcaaaactgatttggctgaaagaagcgcaacctgaattgttcaaccaagctagtcaattcatcgatattaaaacgtatgtcttccaaaaacttttccatacgtatcaaatggattattcaatcgcttcagcaaccggcttgttcaacatttttaatttagattgggatcaacaagcccttgaagtggctggtgtcacacgccaacaactacctgaattagtcgaaccaacggattatgttaaagggattgatccgatctatggtgaattaaccggcattggtgctgaagtaccatttatctttggcgccagcgatggggttttatcaaaccttggggtaaatgcaattgatccaggcgtagtcgccgttactatcgggacaagcggtgccgtgcgagtggttgttgatcatccagtggttgatccaaacggtaaattattctgttacgccttaaccaaggataaatgggtggtcggtggaccagtcaataacgggggaattgtcttccgttgggtgcgcgatcaactttttgcacctgaaaaaatcaaggctgaacaaatgcatgtttcaacatacgatattttgacacaaattgcggcagaaattccggctggttcagatggactcttattccatccttacttgggtggcgaacgggcaccaatctgggatgcagatgcacgtggatcatacttcggtttgacgcggcaacatacgcgggcgcacatggtgcgtgcagcgcttgaaggcatcgtttataacttatacatggtgatgctgatgattgaaggtgtggcaggtaaaccaaagagtattcaggcaacgggtggcttctcccgttcagaattatggcgccaaatgttggcggatgtctttgaacaagacgtcacgattccagagagtttcgaaagctcatgtttaggtgctgctgtcttagggatgtatagtttaggcttagtggatgatctatcagctgtcaaagaaatggttggtgtgacgaatgtgcatcatccagaagaagccaactttgaagtttatcgcgaactattaccaatctggattcgattaacacgggaattaaatacggaatacggcgcaattgctgacttccaacgcaaacatatgcaagttaaagagtaacgaagtgaactgggtctgaaagcccagttacttttaacaatatcatgatagcgcaaacattattgaaaatagggaaaattatggcattagtagtcctattattgggcattatcttattactcgcccttattattcgatttaagatcaatacgtttatcgctttagttataacggcaatggccgttggggttggcctaggtatgccattaacggacattgcaaccagtgttcaaaacgggattggcggtcaacttggtgagctctcaattgtctttggctttggtgccatgatggggcggttagttgccgacgctggtggcgcgtttagaatcgcgcataccttaatcgatatgttcggtaaaaaagacttcaaattgcaattatgttggcttcgttcatcattgggattgccttattctttgaagttgggatggtcttgttagtaccaatcgttttcgcgattgcaatcgaagtaagtgtgtcaattttgtaccttggaattccgatggctgcagcactttctgtcacacatgggttcttgccaccccatccagcaccaacagcaattacctcagctttaggggcaaatgctggtcacgtattgttatatggggtcttaattgcgatcccttcagtgattattgccggtccattattcactaggattgcaaaacgcttagtaccagatgcgttcgcgcgccaaggtaatctgacggcacttgggcctcagaaaacctttaaattagacgaaacaccggggtttggaattagtgtcataacctcattattcccagtcattttgatggctgtcaccacgatttatcaaatggcctttaacggcgggaaattacctaaaaatccaacgatgctggattcaatcgtcggttttatcgggacaccagccattgcaatgaccatttcattgatggttgcgatgtatacgatgggttgggcgcgtcggattaaaaccctagcgattatgaagacgattgaagaagccgttaaatcaatcgcgatgtcactcctagtcattggtgggggtggtgcgtttaaacaaatcctcatcgacggtggggttggcgatagtgtcactaaattattcgcaaatgccaatttatcaccactattattaggttggttaatcgcagttgtcttacgggtggcattgggttcagcaactgttgcgtcattgacggcggcaggcttggtcttaccactaatgcaatcagccggtgtgaaccctgcactgatggtcctttcaattggagccggcagtttagcggcttcccacgtgaatgatgccgggttctggatgttcaaggaatactttgatttaagtgtcaaagaaacccttgcaacttggacagttttggaaacattgatttcgattgttgggttaattggcgttttactattaagtttagtcgtctaaataaaagttaaatgacgttggctgttaaagacagtcaacgtcatttttaatagcacttaaggtgggcaattatttgtaatcggttacttaaaaaaacgctgagaaacagcttttttttaatcttgttcagggacaacatcaaagagatatgatagaatgggtaaggattaatttgaacactggagacgatcagagttaggtcatcctaaaatcaaagtcattgaatcctaatagttgaacgactcaatcgaagagaaagaggtacttatatggataagaagcagcgagaagattcacaaaagggtgaacttaatcaacaaaagcatgagaaattcatacactatgctgatggcacgagtcttgaagaaattaataacacggttgcgattcccaagaacgctggtttttggcggacgttgatggcctttatgggacctggtgcgttagtggccgttggttatatggatccagggaactggatcacgtcaatcgccggtggtgcgcaatacgcatacaccttgatcagtgtgatcctagtatcaaacttaattgcgatgttattacaagcaatggcagcgcgtttaggaattgtgaccggaatggatttagcgcagatgacgcgggccaaaaccggtaaaaagatggggattttcctctggattgtcaccgaattagcaattatggcgaccgacatcgccgaaattattggttccgcaattgcgttagaactgattttcaacatcccattgctctggggtgtcttaattaccgcatttgacgtcttgctattattactattaatgaaacttggtttccggaagatcgaagcgattgtcgcaaccttggtggccgttattttattcgttttcttatacgaagtgattctagcgcaaccaaatatgggcgacgtaatgcgcggatttgtaccaagtacacggattgttaccaaccagaagatgctattcttggcattagggattgtcggggcaactgttatgccgcataatctctacttgcattcgtcaatcgcacaagcacgtcaatatgaccgtgacgattacgccgaaaagaagaaagcaatcaagtttacagtcattgattcaaacattcaattatcagtcgcatttatcgttaactgtttactcttagttttaggggcagcaatgttctttggaactaacagtgatttaggacgattcgttgacttattcaatgctttacaaaacaaagaaattgttgggagcattgctagcccaatgttgagtttactctttgccgttgctttattagcttctggtcaaaattcaaccatcacagggacactttcaggacaaatcgtcatggaaggtttcgttcgcatgaagattccattgtgggcacgacgggtgattacccgtgggttatcaatcttacctgttattattttcacggtttactaccatgggaacgaagcacaagttgaaaacctcttgatttactcacaagtcttcttgagtgttgcattgccagtctcgatgattccattgacaatgtttacgagtgatgaaaaaatcatgggcccattcgttaaccgcccttgggtgaaatatacggcatggtttgtcacaattgtgttgacgcttttaaatatctatttgattctacaaacaatcggcctagttggctaatgaataggtgctcgttaatccgtaaattgatatggattgacgagcgctttttttgttcggtatgctagactagagataaggtattattttggagggattttattgtttgaagtaacgagtgtgcatatcattattcgactgctactggcaaccttaattgctgggattatcggatctgatcgggaatataagaaccgtccagccggaatgcggacacacattctggtctgcattggtgcgtgtgtgattgcgatgattcagcaggaaatcgcagcgcaaaacgttcaatttgcattagcgcatagtgcgattagtaccactattcgttctgatcaagcgcggctgattgcacaagttgtcagtgggattggttttttaggagctggaacgattattgtcacccgccacaagattcaaggattgacgacggcggcctcactttgggctactgcgggattaggacttgcaattgggatgggctactatcaaattgcggtgatcagtgcggtctttgtcattttcgtgattgtcttcttgaaaaagattattcacatcaatacgttgaaaaaaatcgaaattaagtataagcataaattggaaaccaaggagtttattcagagctattttgaacaacatcagattcaaattcgcgatgtgaacttctcagtaacgcaaaacgaacgtgatacgatttacactaacgtctatcgcatcgaaattccccgggaaatgcaatatgcagaaattgtggaagatatctcgatgaataagaacatcatgacgattcgaatggtcagtgtctaaaagagtgcgcaagcaggcgtttatatttcgagtattaactggatttgtctgcaatcgccgatgcgacaagtttggttaagcacaggaatatgcctgctggagcacgtttaaaaaaagtgtgctgtctcaatcgggaaatacatttacgaaaaaagaagccccctgataaacttttttatcagggggcttctttttatttcagtctaattaaacgcaatttgtctgtctcttggtaagattaagttgagaataattgcggcaagcgcacaaatcgaaattggtgattcaagtaagtattggatcatttgaggcgttgctttcaccaatgattgtggcatgatgatgatggcgatacatagaatgattggaattccgatgatgtacatatcacgttcttgggtgtgtagtgtgcgaataacatttaacccgttgagcatgatagttgaacaaatgatggcgaaaatcccaccaataactggggctggaatcgctgataagaaggccgctaatttattaaagaagccgaagatgataaaccaaatcccggcagaaacgaatacttttttactagcaacaccggtgattgaaataatgccggcgttagttgcataccctgtaactggtgagccgcctaagagtgcagcgattaaacagctaattccttcaccgataatcccgtgattccattgtttcttactgatgggcgaatccgtaacggcactcattgcaaaccaagtcccggtcgtttcggtcattaaaacggcgtagataatgacgaaggtcatgattgctgtcatcgaaaagtgcataccatagtggaatgcggtgaaacttggcaagctaaaccaactcgcttcgttcacactttgccagtcaaatttaccaagcatggttgctaaaacagttccgcctaataaggcgatgatgatggaactaactttgaagagtttttgtaatttagggaagtagatacctagcgaaacacaaagaattagaatggcgacggtcacaacagccaggagtaagttctcattgatattgccctgtgctttgaaaatgttatcacctaaagcagatggcatcagtgaaagaccaacgatggtgatgattgtgccaccgacgacttgggggactaagctgttaataattttttggaagaggccggtgacgccgagaagaattaacagaattgaaccgacaattgaagcgccaatcaccgttgccatcccgccgtctttagcaccactagcaaagtaaatcccggcgattgccccaattggaacaaatgaagggccttgggaaacaggcattttcataaaaaatttggtttgaagaatcgtaccaatcccggcagcaaggaatgtcgcttgaattaagccggcttttgcatcaagacccatcgccaataaaccggcaatgataacggggggaacgtagacatccattgctaaaacgtgttgtagtcctaagaagccagcttcttgattcgaaatcggctcgtcaggaccgaccattaatttttgagattgttcattcataccagttgtgctccttttcgtggaccagtttaccttgaacgtagacggccttaatttggtgtttggtgtggcggaataaaagttgttcgagttgttcatctggtgtaagacttgcaaagcgtggtggcgcttgaacgatttggaaatcagcaagcaatcccgattcaatggcaccagcttgaatgccaagactagttgcaccaccgacggttgccatataaaaagcttgtttagcactgatccgactgttcgcaacaccgcgttggtcagccgcaatggtggcgtcaaccccgtcttgtcgaatttgggaggccgttacggcttgttgcaaattggcatataagctaggggtataaccaccggcgatatcactgccaagcccaattttaatgccttgattaagtaactcgtgtgcggggagaatcccgttaccaaaataggcatttgagatagggcagtgcgcaatcgctgcttgttcggttttaatgatactttggtcagtagttgtcagttgtgttgcatgtgctaataccgaatgttgattcaataatccgaatgattgcaacatctcagagtctgtatggccgtaacgttcgcgcacataatcgtgttcccagtcgctttcgctgcagtgtgtctgaacggtgatgtgttgggactgtgcaagttgaccgagttgctgaagtgtttcagttgtgcaactagggatgaagcggggggtaatgacgggttgaatgaacccattacgataggtatcttgaattgcttgaacaaaagtttgtgttttattaatggcttcttcaggagaagcatcacgataatagtctggtgtttgatctggattatccatcgcaacacttccgatgaaagcccgttgccctgcttgggaacaaatttctgcgagtcgtagattcgcagaattgtgaattgttccgaaatatagggcggttgttgtgccgttagcgagcatttcggtcactaagtcttgatacacaggtgtggcgaaatctaaatcggcgtagcgcgcttcaagaggaaaggtataatgattgagccaatcagctaaagggcgatcaagggcaattccagcttgtggccattgtggcgcatgattgtgtagatcgataaagcctggtaacaagaagtgtccgggagcgagtgtgattaagtggtcatgttggcgtgcagctgataatcgctcagagtattctgacgccgtttgatgaataatgtttgtgatttgaccattatcactgatttctatcagtgaatattcgtgaaatgaactataatttggtgaatttgcagaaaaataacttgcttttagtgtgattggcaaacttttaaacctctccttctagatggtgtgttgtaagtatatcacataccataatgcttttaaactttaaaatcgttcgccttttgattcatttctaagggatgctttcagaaaacgacacgtgagcaaaaaggtaccctaaaaaatagcagactgctagaatgaacttaaataagctagttgaaaggatgaatcacatgagtttagcagatgaatttgtagaacggcgttttattgtctttcaatgctataagtgccaacatccagcgatggaaatcacgacgaagacagcactagaagataattcagatggctctaccaagtttcaaattgaaacaacttgcccacggtgtcaagcaaccgatcaatttgttatcaataacggtcaagaaggggaaattagcgcgagtgtcaatagtggcaaagtcgctaaggttgccaacattaaataaggcaatcgacgttcgctaaaagtgaacgtctttttttgtggcgtaaattgtatataattatgaatacatgaataaaaaggctggaaacggttgatttattcaaatataattgacattatgccctttgaattgtatatttattctacttaatacaattataaaggacttattgaaatggcgaaatcaaaaaaaattaacgttcaaggtctcgtattgatgatttttgggtcaatcttcggctttgcgaataccacaattgctttctacttaatgggctatgccagcattatttggtatatcttagcggcaattttctttttcttaccaacttcattaatgtttgctgaatttggttcttctttgaaagaatcacgcgggggcatctattcttggttagaagcatccattggtaaaaaggcggctttcatcgggacgttcatctggttagcgtcatggattgtctggatggtgtcaacagctgctaaagtgtgggtgccgttttcaacgttcctccaaggttcagatcaaacagcaacctggcatttattagggatgaatggcactcaagtggtcggtgtcttaggaattctttggattttattattaactttcctatcaagtcgtggggttgataagattcaaaagtttgcgtcattcagtgggatggccgttgcctttttattcgccgcattcttagtgattagtgtggcgatttggtttaaaacgggttttcatttggcagaaccgattcatgggacgacgacctttgttaagagtccgatgagtagctatcaaacaccaattgggatgttatcatttgttgtcttctcaatctttgcttacgcggggatggaagccatgggcggtgttaccgatagtatggatcagcctgaaaagactttccctaaagggttaatgattgcgacagtcttcattacattaatctacgcggttgcaatctttatgtggggcatctcaacgaactggcaacaagtcttgagcgggaataaagctaacatgggcaatattacttatgttcttatgcaaaacttgggttatcaattcggccatgcctttgggatgacgacacccgttgcgatgacgattggaacaacctttgctcggattaccggtttaatcatgtttatcagttacttaggcgcatttgccgtcttgatttattcaccattaaagtcatttgtactcgggacacctaaagcactctggccgaacggctttgcagaagttaacaagcatggcatgcctgaaaaagcaatgtgggcgcaagcattattagtctgcattttaatcgcggttatttcatttggtggtaaagctgccggtgacttctataatgtcttgactttgatgtctaacgtttcaacatcgttgccatacctctttttagtgactgcctttccatatttcaaggcacgcaaagatttggaacggccttacgaattctttaaatcaccagttgctgttaaggcggtgacgattgtggtcgacttagtccttgtcttcggaattgcctttacgattattcaaccgatgttagaaggtcaatatttagatgccttctggatggtcattggtccgattgtctttacgattatggcccttgctttgtatcatcgctatcaacgaaaagcagtacatggctaaattttttaaaagcgttgaccgatttggtcaacgctttttttgatggcctaattaagggcttgtgaattttaaaagggattaattctcatttaattttaatgtacaaaggaaaatagttgcattttcagattggttccgttttagaactaatctgatttttaaagactaacataaagccccatctagcgattttttaatttttaaagaaagttggttacctaactatcacattagaataaaatgagaataaaagtggacggtgtgcaactttcacaataaacctgtatactttttagatatagttttcagaaaatgaaatcaaagggggattctatgactgtcaaattacaagtcaaaaatctaacaaaaatatttggtaagcgcgtgccgcgtgccaaagaattactgaaacaaggaaaatcaaaagcagcgattctaaaggaaacaggtgcgacaatcggtgtcgaccgggctaacttcgaagtagaatctggcgagatttttgtcattatgggactatctgggagtggtaaatcaacattggttcggatgatcaaccggttgattgagcctactgaaggtagtgtattaatcgatggcgaggatttaatgcagattgataagaaggcattacgtgaagtccggcgtaaaaagatgagcatggtattccaaaattttgggctctttccaaatcgaacgattcttgaaaatacagactatgggcttgaaattcaaggcattgataaggcgacacgggaacaaaaagcgaatgaagcactcgatttagttggtttaaatggttatggcgatcagtatccgacacaattatctggtgggatgcaacaacgggttggtttagcgcgtgcattagcgaatgatgctgagattttattaatggacgaagctttttctgcgcttgatccattgaatcgttctgacatgcaagaccaactactcgacttgcaagaaacgatgcacaaaacaattatctttattagtcatgatttaaatgaagcgctcaaaatcggcgaccacatcatgatcatgaaggatggggaaatcgttcaaaccgggacaccggaagatatcttgacacggcctgctgacgagtatgtagagaaattcatcgaaaacgttgatcgtagtaaagtttacacggccggcaacgttatgattcgcccaacgactgttaatattgaaaaagatggccctcgtttggccttaaaacgaatgcgtgaaaatgaagtttctaatgcttacgttgtcaacagtaaacgtgagttagttgggattattgatgcgcgtgatgtacttgagttagtccgcaaagaaagtcgtgatttgcaatcaatcgtgaatactgaagttccaacaaccgatgaagagacaccaattgctgatatcttagatgatatttcgcaaacgggcattccgtttgctgtcttaaatgataagcaacaattacgtgggattattattcgcggggccgtcttaggggcacttgcaggaaacgaggtgaaccattttgcttaatttaatgacgattgctaaattaccaattgccaattggatggatcactttgtcgattggctgacacaatttactggcttttttaatggtttaacgaattttattggcggaattatcaacgctttccaatgggtgtttgatttaatccccatctggttattcatcgtgattatcgctggcgtcacttatttagcgaatcgcgacaccaaaaaatggggtttaattatctttgaagtcctcggcctactcttgatttggaaccttgatttctggcgggatatgacgcaaacgttaacgttagtgttaacctcgagtctgatttccctcgtaattggggtgccacttggaatttggatggccaaaagcgatattgcccaggcaatatttaaacccatcttagatttcatgcagacaatgccggcatttgtttacttaattccagccgttgccttctttggtatcgggatggtcccgggcgttttcgcatcagtgatttttgccatgccaccaacggttcgtatgacaaaccttgggattcgccaagtgccaaccgaattgatcgaagcctctgattcatatggctcaactgaatggcaaaagttaattaaggttcaattaccattggcgaaatcgaccttaatggctggggttaaccaaagtatgatgttggccttatcaatggtcgtgattgcgtcaatgattggagcaatgggcttaggaacacgagtttactttgctgttggccggaatgatgctgggggcggttttgcagccggcttggcaatcgtaatcttagcgattattattgatcgtttaacccaagctttgaaccggcaacgtaaacattaaggagggattcagtgattaagaagaataaattaatagcttttttcaccttagtggggctcgtcacacttctaacggcctgcagttcgcaaactaagccgtacgctaccgatgagaaattaggcggtcaaattaattacacgattaccggaattgacgcgggtgctgggattatggcatccacacaaactgcaattaacaagtatcatttgaatgatcagaactggcagttgcaaaccagctcaactgcggcaatgaccagtacgttagacaaagcgattgcggataaacgcccaatcgtcattactggttggcaaccacattggatgtttactaaatatccaatcaagtttttaaaagaccccaaaaatgtttttggtcaagctgaacacattaatacggttgttcgtaaggggctaaagaaggatatgccagaagcatataccatcttagatcgattccattggacgccaaaggaaatgtcgaccgtaatgcttaaagtcaatgacggtgttgaacctgaaaaggcggcgcgcgattggattcaagacaatccagaaaaagttgctgagtggactaagggtgttaaaaaggttcatggcacgaaaattaagttaacctatgtggcttgggattcagaaatcgcgtcaactaacgtggtggctgaagttttacgtcaacaaggttatcaaccaacgattcaagctatggaaattcaaccgatgtgggcgtcagtcgcaactaaagcagccgatgcacaagtttccgcatggttaccgaagacctctggtttatactacaaggattacaaaggtcagattgaagacttaggtccgaacttagagggtgctaaggtcggtttagctgtaccgaagtatatgacgaatattaattcgattgaagatttgaaaacaaaatagaatcaaacagcgtatgcgatctgttcagatagaacatggttagatgatcaaatttcggctgttgaaagagtcggttagggcaaaagttacttttgttccaaccgactctttttttatttgttagacattctctgttagaataggactattgaatgttatcggaggcggaatagatgtctgttaaggcgtttttagattttatcgaattacgcactaaagttggtagcgtgattccctttatggctgggttcttttttacgttgtattatttccaccaaattgatccgatcaataccgtgttgtacttctgtgcattggtgttaattgatgtcttcacaacgggatggaataattacaacgactttcacctcgctaaaaatgaaacgctccagcaatcaaccagtgcattaggacgacaagatattgcccctaaggttgctttacgctggttgatcggctttataagtacggcaaccgttctggggctgattctggtctggcgcacaaatttaattgtgttagccatcagtgttctgttcatcttaatcgggattttatatacttacggcccattcccaatttcacgattaccactgggtgagttgttatcgagtctggtattagggttcggtaatttctttttgacggtgtatgtcaacgttccggcggatcagttggtcgatttgcgctttgatgggccgttaatgttattccaactgaattggctgaatgtgattttggtgtttgtggcgagtttaccaactgtcttcctgattgctaatttgatgttaatgaacaatatttgtgattacacagtcgatttagagaatgggcggcacacattaatcagttacattggtcaaaagcgcggcattcaactttatcaacttagtgcgtatagttgttacgtggtgattattgttgggattggcctgaaattatatccatggccagcagcgctagcttttgcgagtggcccaactttgttacgtaatgggtttgcattacagaagagtcaggaaaaacgcgttgtatttggtacagcggttcagaatctaattgtctttaacggtttttggctagtgggaatgttgattggcctctatctttaaatgaaaagtcactgcggtggcttttttatttcaaaaaaagtattgattgtatatacaattttgattataccgtgattattaaaacgcttacatgcggagatgagagttatgacatatgcaatgattgggacttggcgaatggcctttgaagggattcaaaaagcgatggctgatttaaaaaatggtgggcaaagtacggatgcaattgaaaccgctatcaaaaaagtggaagattaccccttctttaaatcggtcagttatggtggtttgccaaatgcgcaaggcttagtggagatggatgcggcattcatggatggcaacacttttgcaattggtgctgttgcaggaattagtgatgtgaagaacccaatctcagttgcgcgtcaattaagtgacaatcattttaatagtttcttggttggtgcgggagcgtcacaatatgcgatgttcaacggttttgaaagccgtaatatgttgaccgaacgcgcacacaaaatctggatgcaacgaattaaagaaattaacgaaaaaaatcttagcccatatgatggtcacgatacagttggcatggttagtttggatcaagctgccggtatggcagcggggacgtcaacttctggattatttatgaaaaaaccagggcggactggtgattctgcattatctggcagtggcttttacgtggatagcgaaatcggtggcgcaaccgctactgggttaggcgaagatttaatgaagggctgtctttcatatgagattgtgcgcctgatggggaccggtttatcaccacaagcagcgtgtgatcaagcagtctatccgtttgttgagaaattaaaaaaacgctacggcaaagctggcgagttttcgttggttgccttaaataatcaaggtgaatggggcgtggcgacgaacgttgagtttacgtttgcagctggcaatcaagatgcggcaccacaaatttttatggctaatccagggccaagtcaaacgacggtgatcgaacccatttcagcagaatggcttgaagcctacgcgaaacggattaaagcaccagttgaatagaggaagtggttggaatggttaagtatctatacgttgaaattgcagaagccttacgagatgacattcaaaaaggggtctatgggatccatcagaaattaccatcggaaacggatttagccaatcaattttcaacgacgcggctaacaattcgcaaagcaatcgatctattggttaaacaacatgtcgtggtacgcgatcgaaatcgtggcacctatgtacttgcaacacaaagtaaaatttcgagtggttcatctggtttagttggttttaccgaagcagccaaacagtttcaattggatgtcagcacgcgggtgttagatttacgccggacaatcgtttatccggactatgtggcctccaagttagatttagcaccacaggagccagtttggcagattgaacgcttgcgaatggcagacggtgaagcgatgacccacgaacaaatctatctgaaacaaaaaattctaccagaattaacggcccatgaggcacaagggtcactctaccgcttgattgagcaaacaatcccaatcgggtatgccaatcaagaactcgaagcagtcgtattggaaaaaggcttaagtgacttacttgagacctctccagggcaacccgcttttctagcccacacggttgcgtattcaatggacggttatccaattctttatgataactcgcattatcgtgctgataaatacacgttccataacatcttgcaacgtgaacattaaaaggagggttttaaatgaaagtaattgtcttgttggatcaaatccaagctggattaggtggtaaggaaaaaggggatacccctttaggtggaaaaaaattagcgatgggtgctgcggatacgctcgataaggcattaaaaaaaatggactctgaaattatcgggaccttttattgcggaactgattattatcaggcaaacaaagccgaagtgaatcggaaagttgcgaagatgagtgagaaaatgggtgcagacgttgtgattgcgggaccgacctatgattatcgggacttttcgacgatggcgtgtgaattagcagccactattcaaaaagaaacaacaattccggttgttgggctgaccgcgatcgaaaagaatgccgatttaattcaacagtatcaagatcaaataacgattgtgaagataccaaaaaagggtggtactggtctttcggattcaatcgaccacgcattgcagttatgcaaaatgaaggttgaaggcgctgattttactgattttattaaccaatattgttattaaaaggaggcaaaaccgatgcaaaagaaactcgaacagattttgatgccggttgcgattaaactggggaataatgttgtactccgatcattgcgagatggtttcttaatcattacgccattgattatcgtgacatcgattttcttactgattgggaattttccaattcctggttggactgaattttggagtgggattttagggccgcactggacagaatggtttagtgctgtttctaatttagtgtttagttttacagggttgcttgcttgttttgggatatcctatgcctatggtaaaaaccgagggttacaagcgattcataccagtgcaattgctattatttcattcttaattttgacaccgactgttgtcaccgttggtaaaaaatcaatcggtgccattcaaacaatgtatttgggacctaacgggattttcctagggatttttatcgcattagtcagtgttgaaatttaccgttttgcgattaaacgcaactggcgaattaagatgccagatggtgtgccacctgcagttagtgaatcattcgatgccttactaccggctggcttagtggtattagttttcttcttaattagaattggttttagcctttcgagtttcgaaacggcctacaatttcatctacacgttactgcaacaaccgttaaaaggtgccggcaactcattgccatctgtattgctttataacttcatcgcaatgttgctctggtgttttgggattaatggtccaactatcaccaacagtgtgtggtcaccaattttcttcgttctgacgcaagataacttaacagcattccagaatcatacgcagttaccacatattttcacccaacaatttattgacatcttcaccacatacggtggcggtgggagtaccctctcactcttaatcctcatgttaaccgtctgcaagtcaaaacgcgtcaaagaattgggtaagttggcaattgtccccggtattttcgggattaacgaaccgattatcttcggtttgccagtcgttttaaacccaattattgcaattccattcattatcgtaccggttttaaatacattgatttcagggattgtattccaactcggatgggtaccgtatacaaatggcgttatgttgccatggacaacaccaccgattatttctgggtggctttcaactgggagttggacagggtgagtcctccaattatttgaattagtgcttggaattttaatttactatccatttatcatgatgattgatcggcagtatttggcggaagaagccgaagcggctggcttagacgatgttgatattaattttgacgaaatttaatagaaagaagccattcttgtgaaaccgattagagcagattttaaggcattatttgaagcacatgctgatgagttcttagcggacttgcgggaagtgttacgcgtgccgagtgtgtgtggagcgcaaacgtttgaagcgccgtttggaattggtccgaaacgcgcattggaaacagtgttggcgattgctgatcgaatgggctttaggacggggcaagtcggcaattgtgttggctgggcagaatatggaccagacgaaacgcaagcgccaacttattttgggattcttggtcatttagatgtcgtggatgttgaagatgattggcattatccaccatttgaactgactcaggtagataatatgctgtatgggcgtggtgttttggataataagggaccatttttatcgacattatttgccctgtatctgattaagacgcaaaagataacatttaaacaacgcgtccgaattatttttggcactgatgaggaatctgggagtcaggatatgccaatttatttggcggaacattccgcaccatatgccgaattcacaccagattgtaaatttccagccgtctacggcgaacggggcttgttagatgtccagttagcgttaccgattacggacggctctgagcaacaaattacggcgattgaaggacggttcgctaaaagttatctgccagatcatgcacagctgattttggccgatggcacggttaaaacttatcacggcaaaaaggcacctagcaatgccccgaaatggcggataatgtgttaccgaagttagttgccgatgcaagtcaactcactggtcaaacgggtcaattttatcaatgggtagccgctaaaatcgggacgcagtcaactggggaaaacttggggattaattatcaagatgaagcatcaggagcattgcaacttgctttttatggggtatcgattgaagcccaacagttaagtatgcatctgacatgtcgttacccaatcccagtgacggaagatcagttgttaactgggattaaagctgccatgttgccggggatgacgttgacggttaaacggcgttatccatcgcaagttactgatccaacattgccatttattcaacaaccctctgcgatttatgcggcagatactggtttggatggcacaccggtcacaacaacgggcgtgacttatgcgcgcgcgttaccgaacatcatcgcgtttggcccatcatttccaggtcaaaaagggattgcccataaaggggatgaatggcttcaattcagtgactggcaaatgatgatgcagatttattatgatagcttgctcgcagtctgtactggaacataaaaaagcgtgtgccataagtcgggataccctgaggattagccggaaggggatgacttataagaacacgtttagacgattaaagttctaatatcaaaaaaggggctgagacaaaatttacttttgtctcagccccttttactgtttagcgacttgctaatgcgcccattggatcccatggtgcgagaacggttgggtgatcgtattcttctgtttcaatgcgtttcatttcatccgttaagaagcgtttgttgatcacgatttgataaacaaattcgtcaaaccaactatcactcatgacgaagtaacctttcgtcccaactttgtcaccccatgagttttcaaccttccatttggttggttgaccatcgacgaggtcgacaccggtgatgaccatcgcatgggtcatgagactttcaccgtaatcaaggcgttcgcctttagaaattgaaagatccatgccgagcatggcatctttttgataaatttcagtgtccatgatgccgagtttgcgatcagatgattggcctacatcgctaccgaaccaaacggattcacctgcttgtagttgtttaatcgcgagttgtttgaaggtgtcgatgtcgaggtttaaatgccgcacttcacggccaccgaccacattgcccaacatttcaacgctgtataagtggttgtatggtttgtcggcagttggtgagttaatcaatgaaacgtaattttcgaggtcccagccaacgtatttttgatagaacgtttgcggtgtgaggcctttttcgatgtgatagttgtgatcatcatcgcggtattcaaagtcgaattcaacgggtggttcgcccaatgcataaacgagcatccggtaaacttcggttaacatcgcgtcttttttagcttggatgtcggcttcgctaacaccgtcggctactaattggcgtaatgtaacggcatctttacggagtttaaggttcaaaacgccgttgagttcgcctgatttttcactattatatgtttcgggcatgactgacttaggtacaatcccgtatttttcgatgagtgcgcagagcatgtcccattggccgccatcttgttggggcgttgtcattaagaagtcgactttgcggtcgccaattggttggctggcagtcttcaagacgttttcgtagaagtagtttgatttttcgaatttgtcccagaagttggtgtagttttgggacaattcgaaatccttaattttgaattggtcttggaggctgtggcgcattgtatttaacgcggcgaacatccagcaacgaccagattgcttttgattggaaacggcaccggtatctaagtcgattgaaaaaacgggggccattttggcttttgaatcggtattagcactcgtggctaaaaagccgttgttcataatggcatttttaattgtgttggattgtggtgttgccttgaaatcggctttgaattgttgaatatcttttgctgtaatgggttgaaccatgtggaaaacctcctctaaaatttggtgggttaaattaaattacccggtttgaatggcattatttttttgaaacgtgctttcatcaacaacttcttccgccttacctcacttgccaaatcggcgactgcattgccaattcgtcaagtgctgtaagtgctcagaagtaacccattgatggcgcactctgatttgaaacgtgctccgtaagccatatccttccggttaaccctgaacgtcaaacgattgctggcgcaatccttcgccgttctgtgttaatcctcaggataaactcggcttactacgcactctattgcagtgcgtcccatgggtctagcttaattggggtttttgtgagtgcggcttgttcttcttttgtaaggtacgcttttttgacaattacctcgtaaacgtagtcgtcaaaccaagcgtcgctcatactgaagtaaccttttgtaccgactttggcactccatgtgttttcgactttccatttcgttggttggtcgtttacgaggtcgacaccggtgagggtcatcgcgtgggaaacaacgccttgtcggtagtcaagtcgttggtcttttggcatcgtcaaatcgaaaccaaagagtccagaatagtcgtaaaggttgcgatcaagccagcctttttgtcggtccatatccgcgagcacgtcattgccaaaccaaattgtttcaccgttttgtaaggattggatagccagtgcttttaaacgttcagggggtaagtttaagaggcgcattgggtgaccttcgactaccgtgttttgcgattctaaactgtagagttggttgtattgtttacttgtttgggggctgctgacaacggtgatgtagtcgtcaaagttgcgattgagatatttttgatagaaactttgcggggttaaaccgcggtcttcatggtaattttggtcgtcatcgcgataggtgaagtcaaacgtttcgactggttcgccgaatgcgtaaacacatagccgatagatttcacttaagaaaccagtccgcgtttcactgatggttgtttcgctagcgttgtcagcaacaagttgccgtaattgaatcgcatctttgcgcagtttcaaattaagagtgctgttgaattcagtggttaagtcactgttataagtttcgggcatgaccgacttgggcacagcaccgtatttttgaatcagtgccactgcgttgtcccattggccaccgtcaaaatcgggaccagcgagggtgaaggcgacttcgcgatccgtaatcggcttgtcggcagttgctaaaatcttttcataaaagaggttcgccttttcgatgcgatcccagaaagatagataattttgggagagttcgaaattcttaacgtgatatttctgttcgaaatcgtggcgtaatgtatttagagtggcaaataaccagcaccgcccactctttttttgaaagctgacatcaccagtggggaggtcgattgagtaggttggatcaagggtgacggcagcatcggggcgttgactaacggcgttaatgccattcgtcatcacagcatttttgagcgtcgttgcttgtggcacgccagctaaagcggtccgcatcttgattaaattattatgtgtaatttcttgggtcatctaatcactccttaatttttgaattagtttaattctagttgattagatgggagatgtaaaccgaataacggggataaagctaaaagaatggtgattgataaatgtgaaagaaaacgatttatatgagagcacgggacacaaaaaaacgaaccgctgagggttcgtttggaaacgtgctttttaaagctgacgcttgcgcttagctacgtattgcaaacgaccgattttgtcggtcatttaaaacactgtgctagtgcacagtgtcaaatctcctttaaacgcacgctttattttgctgttaaaatcttcacgccatcaggtgcgccaaccacgacttggtcgacgatgtctaggaatagaccatgttcaacaacgccgacttgttcactgagccatgatgccagtaggtggggatgttggacttggttgaggtgtaaatcgatgacgtagtttttagaatcagttaagacgtgttggccgtctgcagtcatccggaattctggatttaagccttctttagccattttgttgaacacttgttggctgccaaatggaatcacttcaactggtagtgggaagcgaccgattgtatcgaccactttttcttgatcaacaatccaaatgttgcgggttgaagtagttgcgactaatttttcgaataagtgcgcagcaccgccgcctttaatcccttggaagttggcatcgacttcatcggcaccatcgatggttaaatcaatgtggtcgacatggttgagtgctttgaccggaatcccaagtgatttggcttgttcttcagtacgaattgaggtgcagacacatgttaagttgaggtgttctgcttgtacccgttttgcgagggcttccaccatgtaaactactgttgaacctgttccaagtcctaaaatcatgttatcttcgacaaaatccactgagcgttcagctgccatctttttcattgcattcttatccatcaagacaccccttttgtattaataaatctattatacgaaaaaaacgctttaattgggcgctttttgttaaatttttaattaaatcagtcttaggcattattcacagcctccgcggtttcatggtatgatacagtggtacaaaaagaacccaaatgggcgataatattaggagttttaggaatgaaaaaacgcggctttgaaattgtgaccaaataccaagaggcgggattgagtttaccggtgcgttcaacagcgcattcggcgggctacgactttgcttgtgcggaggacttcgtgttgccatcaatctggcattacaactttgtgcgtttgttccgaatgattcgaaatggcaaaccgttagtggatgacgattttgaacgtgcatcaaaaacgttgaaaccctttctagtaccgaccgggattaaggcttacatgcaagacgacgaatatttaatgatcgccaatcgttcaagcaacccactcaaaaaagggttaattttacccaacggcgtcggcattatcgatgcggattactacggcaatgatgccaacgaaggtgaaatttttatccaaatggttaacttcagtccgcgggatgttatcttgaaaaaaggtgaacgaattggacaaggcatcttcatgccatatttagtcgcagatgatgaagcgacggtaaccaccaaacgaacgggtgggtttggctcatctggtcgctaaacgttaatcgctaggtcgccgaaaattcacaaacttatgttaaaataaaactaatctcgataatgaaggagaatctttgtggctaaaattaagactcagtttgtttgccaaaattgtggctatagttccccgagattcttaggtcggtgcccgaattgtggcgcttggaaccaaatggtcgaagaacgtgaacaacctgcagctagcgcgaaatcaagttttacgatttcagggcgggcaactgaaccagaacaaatcagcaccgttaatattcaaaaggaaccgcgtattaaaactgaattaaacgaactcaaccgcgtgcttggcggtggagtggtaccgggctcattgattctaattggtggggatcctgggattgggaaatcaacgttactcctacaagtttccggacaacttgaaaaggttggtaagattctttatgtttctggtgaagaaagtgcatcccagattaagatgcgggctaaccggcttgatgtgaatggcgatcaactttacttatatcctgaaacggatatgggcaatattcggcatcagattgaaacaatgaaacccgactttgtggtgattgattcaattcaaacgatgagcgaaccagaagtgacttccgcagtcggtagtgtttcacaagtgcgtcaagtcaccgctgaattgatgcgcattgcgaagacgaaccagattacgatttttgtggttgggcatgtcactaaagagggcgctattgccggtcctaagattttggagcacatggtagatactgtgttgtactttgaaggggatacgcatcatacttaccgcattcttcgctcggttaagaaccggtttggttcaaccaatgagattgggattttcgaaatgcgtgaagccggcttaaaagaagtcgcgaacccatccgagattttcctagaagaacgtttggcaggggcgacaggttcagccgtggttgtttcgatggaaggcacgcgacccatcttggtcgagttacagaccctaattaccccaacactattcgggaatgcaaagcgcacgtcttcagggttagatcataatcgagtctccttgattatggcggtgcttgaaaagcgtgctagtctcatgttatcgaaccaagatgcgtatttaaaagcaactggcggtgttaaattagatgaacctgcgattgatttggcgatggctgtttcgattgcatcaagctatcgggataaagaaattccaccaactgattgtttcgtcggtgaaatcggtctgactggtgaaattcgccgggtcaaccggattgaacaacgcgtcattgaagctgctaaattaggctttaaacgtatttatgtaccaaagaataacttacaagggtgggacgcaccgacggatattcaagtgattggtgtgaccacgattgcagaaactttaaagaaagtattcaactaggcataagttggagcgagaggaggttgaacgatgcaacaaaaacgatttactaaaaaaagaatattaggaattgtgttcattatcttaggaggtgcgcttggaattacggcgttcccagtattttggccattagttcatttggaagacatgatgtatctcaataacggtattactaacgtcattttaggggccattattttctatctattattcttggcgctggcaacaccaatgttgagagctatgcaccggcttgaaaaagccttaacgaaacaatcacctagttttattttatttgggagtgttttttcactaattggattgttattagcaaacgttgtttcgattccgctataccggatgcccatttttgcattaaatacagttgtacccattttattgatgattgctttagggtatctcggctttcgaattgggacaacgcgaatggaagaatggcgccgtttgatccaacctaagaaacgcaatgctgatgtattagaacgtaaagtcggcgataatttccgtaagtataagattctagatacaagtgtgattattgacggccgaataaaagaaattgctaagacgggctttatcgaaggcacattgatggtgccaaactttgtcttacatgaactacaattaatttcagattccgctgataatttgaagcgggcacgtgggcgccgtggactggatatcttaaacgatattcaaaaagacgatagcttatctgttgaaatgtacgacggtgatttcgaggatttaacggaagtcgatagtaaactcgttaaattggcaaaattacttgatgggattgtcgtgacgaatgattataacttgaacaaggtctgtgaatttcaaaacgtaccggtcttcaatatcaatcaactcgccaatacgttgaagcctgcagttttacctggagaagcgatgaccgtgacggtggtgaaagccggaacagaacggcaacaaggggttgcctatcttgatgatggcacgatgatcgttgttgaagatggccaacattacttaaataaaccgctagaagtgattgtgacaagtgcgcttcaaaccgctgcggggcggatgatttttgctagaccagcgcatcaacaaaaaggcttgaaagaaaaatagccacgcagaacactttacacggtcgtcaataatctgtatcatggagaccaactaaaccgttaaaattgatgaagagaataagtagatgatgccaattgttaagagagctttcgaattgctggaagaaagccgattgccccatcgaaatgcacctctgaaatgccaagtgactttgtgacttagccgggacaccgttacctgttcaaggcatttttgcaaagaaaagtggaaccacgctcaatcggcgtcttttgttaaccaacaaaggacgctttttatttggaagagtgcgtttgaaacggtttgacttcgagcatttgcctaataccgtgagggagcgccaccggcgatcgtttgcggtatggagcaaagcacagaagtcagtttcaaaaagcacgtttagaagaagagtgcgacagcagatggttatattttgagcattaactggatttgacgaattggcgatgcaatcgccaattgggcaaatttggttaagcgcagaaataagcttgcaagagcacgtttaagaaaggaagattcgatgttaaccgtttataataccctcacgcgtcaaaaagaagtcttcaaaccgattcaagcagaccgcgttaaaatgtatgtctgtggaccaactgtgtataactatattcatattggtaatgcgcgcagtgcgattgcctttgatacgattcgccgctatctcgaataccgtggctatcaagtcgattatgtctcaaattttaccgatgttgacgacaagatgattaaggctgcgaatgcggaacaaatcacggttccggaattagctgaacgctatatcaccgcttttaaagaagacacccaagcacttaatattgaaacagcgacactcaatccgcgggcgacagaaaacattccagaaattatcgcgttcattcaagacttaattgctaaagattatgcctatgccgttgatggcgatgtttactatcgtgctcgtaaatttaaggactatggccatctagctggtcaagatatcgatcagctcgaacaaggggccagcgaacatacagcaaccgaagaaaccctacgtaaggaagatccaatcgactttgccctttggaagtcagaaaaagggaccgatattgcttgggattcaccttggggtaaggggcgaccaggctggcatatcgaatgttcagtcatgtcgaccaaatatttaggcgacacgattgatattcatggcggtggccaagatttagagttcccacatcatgaaaatgaaattgctcaaagtgaagcgaagactggtaaacatttcgtcaactattggttgcacaatggctttgtgacagtcggggatgatgatcaaaaaatgagtaagtctcttggcaacttcgtgacggtgcatgatttgattcaagaagttaatccacaagcattacgtttcttgatgagtagcacgcaatatcgccgaccaattcgctacagtgaatcattattagctgaagcgcaaacgaacctggatcgtttaaaaacgaccctcgataacttagcgttccgccaagcgactgctgaagcgggcgcagacgcagacattgccgcacaagcggcaagcttggaagacgcctttgtgacagcgatggatgatgattttaacgtgcaaaacgggttaacagaattgtatgaactcgctaagcttagtaatcaatacctggaacgggctaccgtccaagctggtacgttagtggatttaactgcccgtctaacgcgcttgttagccatttttggtgttgagtttaaggcggcccaactgttggacgcagaggtcgaaagcttgattgaagaacgcaaagctgcacgggcagcaaaggattttgcccgcagtgatgcgattcgcgatcaattgaaagaacaagggattattttggaagatacaccacaaggaatgagatggagacgcgcatgaaaaatgctttacaactaaacgggattgcgttggcatatatgggcgattcagcctacgaagtgtatgtccgcgcccatttgctagaactcggtttaaccaaaccaacgcgcttgcaacaagtggcgacacattatgtgtcggctaaagcgcaagctgctttgattggtttgatgatcgatgataattatttaacagaagaagaaatgaatatttttaaacgcggtagaaatgccaaaagttatacgaaagccaagaatacgagtgtttcgacttatcggacctcaacgggctttgaagcagtttttggctatctatacttaactgaacaacaagagcgcgtcgctgaattagcccactggtgtattcaacaagtcgacgctgggaggacccatgagaaaaaataataaccaaccattcaaacaaaagaacaacgaattcaatagtcgtcggacggccaataattcggcaaagccaacgcgccgtccagctaacaagaaaccagcagcacccgtcgaagaagcagttgttgaagaacaaactgatttcgtcatcggaaaacacgcttctttagaaacattgaagaccagtgatgcgaagaaaatcaataaaattttcttacaagatggcttgaaggctgactttgtccacgatgttgtgaaattagcgaaagaaaaacgtctaatcattcaaaatgtgcctaaaaataagttggacttattgagtgaccgtcaaaatcaccaagggattatcttagcaatcgcaccgtttgaatatgcgtgtgttgatgatattttcgctaaggccaaagcccgagaagaagaaccgtttatcttaatcttggataacttggaagatccccacaacttgggttcaatcatgcggacagctgatgcggttggtgtgcatgggattattattcctaagcatcgtgcggtggggttaacatcaacagttgctaagacatcgactggtgcgatcgaacatatcctagtggcgcgtgtcacgaacttaacacaagaaattaagaaattgaaggaccgtggtctttggatttttggcaccgatatggctggtaccgactatcgtaagtgggatgctaaaggaccaatcggcttaatcattggtaatgaaggtaaggggctttcaccaattgttaaaaaagaagttgatcaaacgttgacgattccaatggtcggtcatgtgcaaagtttaaatgcgagtgttgctgcgggggttttaatgtatcaggcttataatagccgtcaacctttggtatagcagatgaaaaaacagatcttaattgcagatggttataatatcattgggaactggcccgagctgaataagttgaaacaaaatgatcatctcgcagatgcgcgtgatcgtttattgcagatattatcagaatatcgcaagtttcgtgagattgaagtcatcttagtatttgatgcaatgtatgtgccagggattaaacaaagttatgcgcagtatgatttggaagttgtcttcaccgatgaggatgaaacagcggacagttatatcgaaggcttagcgggtaaattaatgtcgccgattacgcaagtgacggttgtttcgagtgatcaagctgagcagtggacgattttttcacggggcgcattgcgggtgtcttcgcacgatttttatcgtgagattcgccgaacgcgccgtgaaattgaccatgatgccaagcattatcatgatcggaccttgcaacggaatatgccgtggaatccggcgcaactagatcaacttgcacagatgcgagatgcactaagtgctgaaaaagatgattaaacaaacgttctcttgataaatatacgataacttgttaagataaagacgtggggttgcgtgagaggtggttcgttgatggaatcagcaaaacgtgatgcaaacttaattcaagcggtggttgaaaacgattctgaggcgttggatgttttatttaaagcctacctaccaatggtttatcgcacctttactccatattatattcgcttatttgatgaggacgattggttacaagaagcgcgaatcgtctgttatgagacttgccagtgttatgatcaaaattgcggcaaaagttttggtggtttttataaattacgctttcaccaccacgtattaaacttgattcgcaaagaacttgctcagaaacgacgggtcgatcagcaagccctgttatttgattgttgtccggaatgcaatgcgctcgctgaagataccgttgcatactatcagtcaacggttgaaatgcgggcgtacttagagacactatctgctttagagttagtggcctttcgggttttgacggggcaactagcagttgagcaagcgtgtcgtcagctagattgcacgtttgaacagatgaaacgggcacaatcgcgttgccagacaaaattaaaacgattctatactaaacaataaaatagctaaaagctgctaaccgacgatttttaggcattggttagcagtttttttgtgtttagtagggagcataaaaaatacctttcatgcgataaaataacaggtgacaggttaatgatggggataggtcaacaaaatgggcggcttatatatttttaaataacattaattgacattaagaaagaaagcgcttatactaaaaatatagaagaaatgaaaacgctttttataagccttttgtcgttttctaatcaattaaaatttaaggggtaattcattatggcagaaaaaacaatcatgttatgttgtgcagcagggatgtcaacaagtttattagtttcaaagatgcaaaaggccgctgaagcacaaggcttagacgcagaaatttttgcaactggcgcttcagatgcagacaaccaactcgaatctaaaaaaattgactgcgtactattaggccctcaagttcgtttcatggaaggtcaatttaaagaaaaattggcaccaaaaggaatcggtgttgaagtaattgatatgaaggcttacggcatgatggacggcgaaactgtcttgaaacaagcgttagcattaatcggttaaaaaaagattaagaaaagcggtagcgacctatttttaggcggctaccgctttttttgtttatgaatcaggtataattaaggcaatcaagtataaaggagtttattcaatgagtttaattggtacattaatttggtggctattcgggggattagtagaggctatcggttggtttattctggggattgcctggagtattacgattattggaattccagtcgggctacaacgttttattggcgcattgaccttgatgccgtttaacgcaaccgttgtttcaacggggggtgcaggttcgtttttattaaacattgtttggtttttcttaggtggtcttgtgatgtgggcgagccatgtcttttgggggctattattatcaattacgattattgggattccatttggccggcaacactttaagctagcggcgttatcgttaagtccgttcggcaaacaaattaattaaaatgcaaaagggcaacgatattgatcgctacccttttttatgtggtgcaggcatatttctgtgcttagctacacaagtcaaacgattgcttgtagcaagcattcgccttgttaggctgatgctcgcagcataaccggcttttgacgcactctattgtgttagttcttctaatgccatcgcttgttcttcccagtctgattctgtttgagcgagttcagcttggactttttctaggtcttgttgtagttcttgaagcatgaggggtttagtaattacgtctgcttgggtcatttgttcttggattgcgttggccttagtctctagtgcggccattttttcttctaaagcagtaacttcgcgttctagtttccgttgtgcacgttggttttccttacttgctttgtaggcatcttgtgcatgggcacttggttggataattgcactgttttggctagctgcttctgcgtaagctgtttcttcagctttcttggcgaggtagtaatcgtaatcaccgaggtatcgtttgctaccagtatctgatagttcgataatgccagtggcgacttgattgatgaaataccggtcatgggaaatgaagaggacggtgccatcgaattcacggagggctttttccaagacttccttgctatcaatgtccaaatggttcgttggttcatccatgattaagaaattgtcatggttcatcgcgagtttcgtcaagagtaagcgggctttttcaccaccactgagttgtgacacaacctttaaaacatcgtcaccggtgaataagaaactaccaagtagtgtgcgaatttccttttcaggtgttgtatggtgttcatcccataattcgttgaggacggttttgttagtgtgtaaattgcgttgctcttgatcgtagtagcccattgaaacgttactaccgactttttcatggcctttgatgaacggaatttggtgcaagatacttttgagaagggtcgatttaccaattccgttaggtccgatgatggctaagcgttcgtggcggttcacttcaaaattgattggttgtaccatgattttatcgggggaatagccgacagcggcatcgcttacttgcaatacttcgttaccgcttggatgttcgctttcgaaatgaaaatgaattttaccggcttcgttttgcggccggtctaatttatccatcttttcgagttgacggcggcgactttgggcttgtttcgtggtacttgcgcgcactaagtttttatcaacaaaggtctgaagtttatcgatttcagcttgttgtttttcataagccttccattcaagtgagaggttagcttcttttaaacttaagaaatggctgtaattaccggtataatgggtcaatgtgtggcgactcatgtcgtagacttctttagtgattttatctaagaagtaccggtcatgcgagacggtgagcaaggcaccgggataagtttgtaaataattttccaaccatgttagtgtttcgatatctaaatggttcgttggttcgtccaaaataaggacgtcttttttctcaagcaataacttagcaagtgcgagtcgcgagcgttcgcctcccgatagtgtactgattggcttttcaaaggtgtcttctggaaattggaaaccatgtaagacgccacggatttcggcttcatagccgtaaccattagcttcagagaaatcgtgttggacttggtcatatcgttttagtaaggctgcatattcttcgctagcatggtcaatggttgtgtccgcaattgcggtctcgagttcatgcatttgggcttccatttggcggagatcatcgaaaatggttaacatctccgcatagattgtccgggttgagtctaagccactatcttgcgctaagtaaccgacttgagcatttttgctaagaatgatttggccttcatcaggcgttgtgatgccggcaatcatttttaataaggttgatttaccagccccgtttggaccaacgagggcaacacgggcgcggtcttgtacttcgagttgtgcgtttttgaaaaggtaatcgccgccaaaactgcgtgcgacttgttgaacttgtaataatatcacggctaaaaatcctttcgtgcggtgttttttaaagttaattgcgttcatttttataatactactgtcaactatcataacagatttaaacgatggacagtcaaaattgtaaatatattgcttttcacaagaaaattcagtatgatttcagtatgtactacactattttcacaagcaaatcaaaaaggaggtttcaaatggttgagaataatatcccaagagcaactgcaaaacgattgcctttatattaccgctatttaaactttttgaacaattcagggaaaactaaaatttcctctactgaattatccgaagcagttaaagtagatagtgcgacaattcgtcgtgatttttcatatttcggtgcactgggcaaacgtggttatggctatgatgtcgcttcgttgctagattttttcaagaagaccttgaaccaagatcgattgacaaacgttgcattgattggggtggggaatttaggccacgccttattgaactacaactttaagcaaaccaataatattcggattagcgcagcatttgatgttaaacccgaaatgattggaacaattcaaaccggtgttcctgtctattcaatggacgagatggccgaacaattgaagaaccaacagatcgagattgtcattttaacagtgccaattgatgaagctcaagaagtcaccgatgaattagtggccgctgggattaaagggattatgaactttacgccaattcgaatttctgtgccatcaaacgtgcggattcaaaatgttgatttggctaaagaactacaaactttgatttacttcctcgataattatactgatgaacaaaatcaagaataaaaatagcgtttaaacaagttgctcgtagtagccgcctgtttgaacgctttttttaacgattgagatacagtaaagtgacgatcaggttcatcccagcatggctgatgattgtggtgaaaatcgaacctgtcttgcggtacagccaacataggaaaagaccgatggccgtgtagattaacaaatgcccgtcctgatgtaaaaaagcaaacagtaaacttgaaatgatggcggctaaaatgcggtttaagcgactggctaatccaccaaagattgctttgcgaaacgtgatttcttccataatcggtgcggcgatggtcgttgctaaaataagaaacggttgttgttgcatcatggtcatcagtgaaatggtgttgagcgatttggcagtgatgtggagaatgttttgttcaatgaagccggcgagaatctgaattactaagaccagtacaatgccacacaccccccaaatgataatgggtttgagtgggaaaggccgctgctcaatggcattggcttgtgtgcgttgattaagatagagtaaccaggcggcaccgaggcaatcaacaatggttgtgattagaaaaaacgaggcagatagatgaccaaaacggacgactgcactaggaatcaataaaatgaacaaatagctaatgataattgaaaaattttgtttgtatagcgtcatgtgaaagctcctcaaaggttgttgtgacaatagcttagcgtattagcactcaaattgcaaaagtgctagcataatacttgcaatgttctgaaaaaatgctatgataaaaattgtgattagcacttgagatgatagagtgctaaaaaagtaaaattgatggagggattttaagtgttaaaaccattagaagatcgcgtgattatcgccgttaaagacgaagaagaacaaacagtaggtgggattgttttggcaagtaatgctaaacaaaaaccacaaaccggcaaagtagtcgcagttggtaccggcacattaacaagtgacggcaaacgtattccacttgatattaaagaaaacgatgaagttatttacgataaatatgcaggttcagaagttgaatatgaaggtcaacaatatttagtgctccatgctaaagatattatggctattgttgaataataataaacaaaaaaattttttgaggtgaataaattatggcaaaagaacttaaattttcagaagacgcacgttcaaaaatgttggcaggggttgaccaattagccaacacagtgaaaacaacattaggaccaaaaggccggaacgttgttttggaaaaagcttacggttcaccagaaattactaatgatggtgtgacaatcgctaaagcaatcgaattagaagatcattttgaaaatatgggtgctaagttagtttctgaagtggcttcaaaaacgaatgacatcgctggtgatgggacaactactgctactgttttagctcaagcaattattcgtgaagggatgaagaacgtcacagccggcgctaacccagttgggattcgtcgtgggattgaattagcaactaaagaagctgttaagaagttacacgaaatttcacacaaagtcgaaagtaaagatgccattgcccaagtggctgctgtttcatcagctaacgaagaaactggtcgtttaattgctgatgcaatggaaaaagttggcaacgatggggtcatcacagttgaagaatcaaaagggattgatactgaattaagcgttgttgaagggatgcaattcgatcgtggttacttgtcacaatacatggtaacggataacgataagatggaagctgacctagataacccatatatcttaattacagataaaaagatttcaaatattcaagatgttttaccacttttacaatcaatcgtgcaagaaggtaaagccttgttaatcatcgctgatgatgttgatggcgaagcattaccaacacttgtcttgaacaagattcgtgggacattcaacgtggttgctgtaaaagcccctggttttggtgatcgtcgtaaggaacaattagaagatatcgccacattaacaggtgccacagtgattacaagtgacctcggtctagaattgaaagaaacaactatcgatcaattagggacagctggtaaggtaactgttacaaaagatgatacaacaatcgttgaaggtgctggtagcaaagatgccatcgctgaacgggttgaaaacatcaagaaacaaattgctgaaacaacatcagactttgaccgtgaaaaattacaagaacgcttggctaaattagctggtggcgttgcagtgattaaagtcggtgctgccacagaaacagaattgaaagaacaaaaatatcggattgaagatgctttgaacgcaacgcgtgcagctgttgaagaaggctacgttgccggcggtgggacagcattaatcgatgtgatcgaaagtgttgctgcgcttaaagaagaaggcgacgttcaaaccgggattaacattgtgcttcgtgcattggaagaacctgttcgtcaaatcgcaaccaacgctggtcttgaaggctcagtaattgttgaaaaagttaaatcacaaccagttgaagtcggctacaatgcagccaacggcaactgggaaaatatgattgaagccggcatcttagatccaactaaggtgacacgttcagcattacaaaatgcagctagtgtggcggccttaatgttaacaactgaagcagtggttgctgacaaaccagaagacaacccagcaccagcagcaggcatggacccatcagcaatgggcggtatgatgtaaagaagtgcgtttgaaacgggttggttctgagcattaacctaaaaacgagcgttatggcggtttttgccataacgctcgttttgtagttaagcggaaggcgttataaccaaaaagcacgattaaatccaaagttccaaaactggcaaaagttttggaacttttttatttttcaaaaaaaatgcgcatatataaattgtgcgcaaccctattaattaattttgattgcggtataataatagttggaggtgttgacaatgatttttcgaaaccggcggatactgataacctgtttaatgttaggtggcttctttttagcgcgaccacaaacggtccaagcaacgcctgaagaaacgcaaactgccattaagacagcacaagatcatctatccgaattgaataataatattagtaatttaacgttaaaaacaacgcaattgaacgaacaaatgactgcaaaacaggcggatattaaagaaaaacaagacgagttcagcaaaacatctgctgattatcaaaagcaagtggcgattattgaaggtaacctgcggcaattacaaacacgagatagcagttttaatcttgatatgatcgatagtttattgtcgagccaaagtttgagcgatttattccaaaaaggttcaatcatcaatcgactgttagacgctaaggcggataatgccgctgaaacggcctcattagctgaaaaaaagctgaacaaaagactgaattagaagcgcaacaggccaagctggtatcattatcacaggaaaatgatgctgcaattaaggacttagatcaacaaaaacaacaagctaacgaccaattaacgcaactacaaacgaagttcaagaaagaattagaggcgcaagcggctgctcaaaaagcggcgagtgatgcaggtgccgcattaattactggtaacaaggatttaatgaataataagattatccaagaagcggttaaatatttaggcgaccctatgtttggggtggcaccacacccgaaggatttgactgttctggcttagtgcaatacgtttacgctaaaaatgggattaaattaccccgtgtttcacaagatcaaagtaagttaggcaaagatgtaccgctcaatgaattacaaccaaacgacctattattctggggaggggttggaacagcccaccatgtcgcaatctacattggggatggctactttatccaagcaccacaacctggcgataaagttcgaattactaaaatttcagattacaaaccggattttgcccgtcgtttatcataaaaaataagaactgaccaaggaatcgaggcgtttcgattaccttggtcagttcttttttaaattgtggtagtaattcatgcgtaactatagtagaatacgatttgtttgaataaacggcaattatttttttaagttatagagaaattcaaaagtcactgtgtggattgcgacgaatgatattcacatgagggctttttatgttagaaatattatttaaaggggtcatattgctatgcaacagttaaaacggatttttatcgggaaaccgttaaaatcttccgatgagggtaatcaaaaattaggacgctttaaagcgttagcgatgctatcttctgatgcattgtcatcagtggcctacgggacagaagaaatcgtcatcgtattgacgaccctttcggccgcggcaatttggtattcaattccaatcgcagcctttgtgctcgtattgctattgtcattaactttgtcatatcgccaagtgatccacgcctatccaggtggtggtggtgcctacgttgtttccagtgaaaatttggggaaaaatgctggtttagtggcaggtggttcactgcttgtggattacatgttaaccgttgcggttagtatttccgcgggtgcggaagcgatcacctcggccattccggcattgtatgggcatcaagtagggatttccttcattatcgttttgatcttgatgggaatgaatctacgtgggatgcgtgaatcagcatcatttttaatggtgcccgtttacttattcgtcttgatgatgactttaatgatcatcgttgggtgttataagatcttcacaggtgcgattccgttccacgcaacatcaaccgttggggctgttgtaccaggtgtttcgatggcgttgatttttagagccttctcatcaggttcatcatcattaactggggttgaagccatcagtaatgcggtaccatttttcaagaagccacgtgcaacaaacgcggctgaaacattagcaatcatggcagccatcttaggtttcttctttgctgggattacatttttaaactactggtacggcattgtaccagcagaaaaagtaactgttctatcacaagtggcccaacacacctttgggaaaggctttttattctatattgtgcaatttgcaacggcctttattttagccgtcgctgcgaatactggattctccgctttcccagtgttagcgtataatttagccaaagacaaatatatgccacacatgtacatggatcgtggcgatcgtttaggttattcaaacgggattattacattggcgattggttcaatggcattgattttcatctttaacggggatacatcacgcttgattccactttatgcggttggtgtgttcattccatttacgctttctcaatctgggatgttgcgcaagtggtgggtcgaacgaccaaagaattggtttggtaaatcaattgccaattttgttggcgctttgatttcgtttgctatcttagtcattctcttcgtttatcgcttacctgatatctggccattcttcatcatcatgcctgttatgatttggattttctataagattcatgatcattacaagaaagtggcgcttcaactacgcgtgagtgctaaagaagccgtcttgcatgattatgacggttcaactgtgattgtcttggtcagcaacgtgacccaagtaacccgtggtgcgctagattacgcacaatcaatcggggattatgtgattgcgatgcatgtctcaacggatgaaaatccagccaaggaacgtgaaattcaagctgaatttaaggaagattttccgaatgtccggttcgtcgatgtccattcatcataccggtcaattcaaaaaccaattgttcgctttgttgacattgttagcaagaatgcgcaaaaacggaactttacaaccacggtcttggtcccacaattcgtaccaagaaaaccatggcaaaacattttgcataaccaatcaagtctaagactaagaacggcatttgcaaaccgcgaaaacattattatttcaacatatagttatcacttaaaacactagaagtgcgactcgatctgagtaggctttgaagattaacagtaaaatgggcattgtggcggttcttgccatgatgctcattttgcagttaaccggaaaagactgatcgaggagcgcgttaaagaaagaagtgcgtttagcaaccgagcattaatacaaaattggcagttatcccgagttgtgggatgactgccaattttagattaagcggaagttggtgcaactaaaagcacgttaaaagagaagtgtgtttgaaacggtttgactttgagcattagcctaaatctgtgaatgagcgacggagttgatcgtttgcggattgtagctaagcgcaagagtcagtttcaaaaagcacgttaaaagaagaagtgtgttcaaaccgattatgttctgaggattagcaaaattagacgaataagcgacgaagtcgattggttggctaattaggctaaacgcaggaacatggtttgaaaagcacattatcagccccgctcaccttttcggtgcgcggggctttttttgtttttctacgggtacagcaaaactttttattctgggcaaaaattgctacaatagaagctatatcaaagtctgagaaagaacattaaggggcgcaacatgcgaattttatttattggtgatacagtgggcacaatgggtcaaaaaatgatcaatgattacctaccagcattaaagcaacaatacaaaccacaggtgaccattatcaacggcgaaaacatcgcggatggtaaggggatgactcaaaaggattataagaatcttttacaagctggggccgatgcgattacgatgggcaatcatacttggaataagcgcgatattttagaattcatcgacgatgctaaaaaattagtgcggccggccaattttccgaaaggaacgcctgggcaagggatgacaatgattaacgtcaatcaagccaaattagccgtgattaacttacaagggcgcgccttgatgaatgaactactaattgatccgtttgaaatgttagatgaaatggtggctgaaattagtaaagaaaccaactgtatcttcgttgattttcatgccgaaacgacgagtgaaaaactcgcacttgcttggtatcttgatggccggatttcagcgttagttgggacccatacacatgtgcaaacaaacgatgcgcgcgtcttacctgaaggcacagccgttttaacggatgctgggatgactggcccttataacgggattctaggcgtgaagcgcgaaaagatcattaatcggtttaaaacacaacggccagaacggttcgaattagtgaccgaaggaccgggtcaattgaatggctgtttaattgaaattgatgacaaaacgggtcacgctaaatcaattaaaccaatccagatttcaccagatcacccctatacgcaattttaagcaccttagcagcagatcaacgtcaatgagagagggattaacaacatgccacaaaaaacgaaagaaacgccaatgatggcgcaatatcaaaaggtcaaggatcagtatccggacgcttttttattttatcgcctcggtgatttttacgaactctttaatgatgatgctgtcaaagcttcacaattattggaactcacactaacagcacgcaataaaaatgcggatgatccaattccaatgtgtggggtaccacaccacgcagcccaaaattacatcgatattctagtcgatcaaggttacaaggttgctatttgtgaacaaatggaagatcctaaaaccgctaaagggatggtcaagcgggaagtcattcaactggtcacaccaggaacgatgatggatgaaaaagccggccatgccaaacaaaataattacttaacagcagtggtggcagatggcgatcagtttggctttgcttataccgatttatcaactggtgagatgaaagtcagccagattgcgagtttggatttattgctcaacgaaatgttgagtttacaaaccaaagaagttgtcattaaccacggtgttgccagtgaggttgtgcacgcgtttgttcaacagcaaattctcgtgtcgtatcaagaagatggcgatgcaacggccgaagtcagtttcgtttcacaaaacatctcccagccccttgaactggccgtgattaaacaattggtcttgtatttggcaacgacgcaaaagcgccatttagggcatttacaacgggcccaagagtacgagccatcccaatatttaaaattagaccattctgcgaagatgaaccttgaattaacggcttctttacgcactggtcataagagcgggacattattgtggttattggatgaaaccaagacggcaatgggtggccggttattaaaacaatggttagaacggccattattggatttaaaggcgattcaaaaccggcaacgccaagttgctagtttcatgaaccattattttgaacggacaaacttgcaagacgccctcacaaaagtgtatgacctagaacggctagcaggtcgggtcgcatttggcagtgttaatggccgcgatttaattcagttgaagacttccttggaacaaattccaacgattaaaacgattttaacgggcattaatgacgatcagacctttgaccgtgcgttagaccaactcgatccggttgatgatgtacgcgagctcattgaaacggctatcaatcccgatgcgccaatttcagtgactgacggtgggattattcaatcgggttacaacgaaacattagatgattatcgcgatgcgatgtctaacgggaaacaatggctagcacaacttgaagctaaagaacgcgaaattaccgggattcataatttaaaaattggctttaatcgcgtgtttggttactatatcgaagtgacacgtgcgaatttagacgcgctacctgaagggcgttatgaacggaaacaaaccttaaccaacgccgaacggttcattacaccggaattaaaggcgaaagaacaattgattttagaagccgaagaacgctcaaccgcgcttgaatatgagttattcacgcaagttcgcgaaaccgttaagttggagattgaacggcttcaaaccctcgctaaaagtgtggcggcccttgatgtcttacaaagttttgccgtagtcagtgaaaactaccactacgttcagccgacattaatgactgatagtcgcgaaattgatttagtggatgggcgtcatccagtggttgaaaaagtgctcggtcgccaaaaatacattcccaacgcggttcaaatgggcaccgatacggatatgctcttaattactggtccgaatatgtctgggaagagtacgtacatgcggcaactggctttgacggtcatcatggcgcagatgggatgttttgtaccggctaaatctgcgaacttaccgatttttgatcagatctttacgcgcattggtgcggccgatgatttaatttccggtcaaagtaccttcatggtcgaaatgatggaagccaatcgcgcgattatgaacgcgacacaaaatagcttgattctctttgacgaaatcggacgcggaacagccacctatgatggaatggccttggcccaagcgattattgaatacattcacgacaacgtgcatgccaagacactcttttcaacgcattatcacgaattgaccagcttagcggattcactaaccgcattgaaaaacgtccacgtcggggcagttgaagaaaatggcgagttagtttttttacacaagatgctggctggcccagctgataagtcatacgggattcacgtggctaaattagcggggatgccgacaccgttgttgaaccgcgcagatgtcatcttggatcaattagaagataaaccaaaggcagctgtcgcgccggctgctgaaccggttgaagaagtggatgaacaaatttcactattcgaaccagaagtggcaccacaagcggatccaaaagcagctaaagtcctagcggcggttaaacaattcgacttaatgagcgccacaccactagacgcgctaaacatgctatacaaatggcaaaaggaattaaacaaataagagtgcgtcatcaacgggtaacttctgagcatttacagcacttgacgaattggcgatgtaatcgccgatttggcaagtggggtaaagcggaagaagttgttgatgaaagcacatttcggataagagtgtattcaagcttatcaaacttttgagcattagcacagggaagcgaattagcgacgcagtcgatgatttgattcacagcgctaagcgcagaaagttagcttgaaaagcacgttttagcactaaatacccacacgtcagaaaaaggagaacgctaatggggaaaattcatgaactgtcagaaatattaagtaaccaaattgcggcgggcgaagtaattgagcggccagcttcagttgtcaaagagttggcagaaaatgcgattgacgccaatagtactcaaattgacatcgtgattgaacaggctggtttgcaattgattcaagtcatcgataacggcgatgggattgaaccggaagatgtacccactgcatttaagcgacacgcgacaagtaagattgccacgcgccaggatcttttcaaaattcagtcacttggctttcggggtgaagcgttagccagtatcgcgtcagtgtccgatttgacgattgaaacggcaaccgctgattcgttagggacatttgctcattttaaaggtggcgtcttagaagaacagaaaactaatccaattcgccctgggacggcaatcacggttcgtgatttattcttcaacacgccagcccgcttgaaatatgtgaagacgttccagactgaattggcaaacgtgatcgatatcgtcaatcgcttggcgatgagtcatcctcagattgccttcacgttaaccaatgatgatcacctgctgttaaaaacggcgggtaataacgatttacaacagacgattgccgggatctatggcgttacaatggctaagcaactcttgccagtcagtgcagaagatctcgattttaaattaaccggctatgtatcgctaccgaaactaacgcgggccagtcgtaattacatttcagtgttgattaatggtcgttatatcaagaattatcaattgaataaggcgattatcaagggttacggttcaaaattaatggtcggccgttatccagtcgtcgttttaaatattcaaatggatccactgttaatcgatgtcaatgtccatccgaccaagcaagaagtccgcttgagtaaggaacctgctttgatggcgttgattgaaaaagcaattcgtgagcgactcagcaccgagaatttaattcccgatgcagtgcagaatctaaaacaaacgaaaccggtcgatgtggaccagcttcaaatggatttaaaccaaattacgagtcaacggcgcaatgcgactggtacggtgcggccaattcagccccaaacagttcctgaaaagccggttaaaactgaaatgcaagcggcagcgcaaattgcggaaaccgaaacaccccttaaacgagaaccaactgctaatcctaatttaaatagcctgccgatatttgaacaaccccaacaattggcccggtgggatgataagtacgaagcagaggcggtcggaaatccgtttggtgaacaacctgaagatgatgcagcacccattgagcgtttcccagcgttacgctatattggacaactgcacaatacattcttattagcagaaggtgaagatggtttttacattttagatcaacatgctgctcaagaacggattaagtatgaatactatcgcgaaaaaattggtgaagttagcaacgacgcccagaatttattggtgccccttgtgttggaatatcccaatagtgatgcgattaagattcaagcacaaaaggaactccttgccgcagtgggtgtgcagctagagagcttcggccaaaatagttttgttatccatagtcatccgacgtggattgcgcaaggccaagaagaagcaacgattcgcgagatgattgacactgtattggaaaacgggaagttagacattgcccatttccgtgaaaaaacggcgattatgatcagctgtaaacagtcaatcaaggcacaccatcacttagatgatgtgcaagctaaagcattgttggttgatctggcacagacggaaaatccgtttaactgtccacatggccgaccggttttaattcattacacgcaaaaagatttagaaaaaatgtttaaacggattcaagatccacaccatagttgggagggcgaataatgtttatcttagcatcacaatcaccaagacgccgcgaacttttacaaaaagtcgtgcctgatttcgaggtccaacccgcaacaatcgatgaacgccaggtaccagtgacggcaccagctgactacgtgcagatgttggcgcaacttaagggtgaatccatcgcccaaaagaatcctcaggccactgtgctcagtgctgatactgttgtcagttttcagggtacgatttacggtaagccacatgatcgtcaagatgcagccgaaatgttacggcaattgagtggcagcacgcatcaagcttatacaggtgtttggttatccattgatggtgaaatccgcaaaacggttgtccaaactgatgtcacgttctggccgttaagtcatgaaatgattgaaacgtatttagacaccgaagagtaccgggataaggctggtgcttatggtattcagggacagggaagtctgctcgttgagaaaatcaacggtgacttttacaatgttgttggcttgcccatcagtacggtggctcggttgttaaccgctaaggaggctgactaatggcaacgcaaaacattgccgtttattgcggcgctagtagtggtaataaaataatctacacggaagcggctaaggcgttaggcacttggattgctgggcgcaatgcgcgcttgatttatggcggcgcccaagttggtttaatgggcaccgtggccgacacggtgttagcccatgatggacaagtgaccggcgtcatgccagggtttatgagtcagcaagaactcgtccatccaggtttaaccgaaatgattaaggttgatacgatgtcagcgcgtaaagccaagatgattgaactggcagatgtgtttatcgcattgccgggtggtcccggtacgctggaagaaatgagtgaagttatttcatgggcgcgaattgggcaacaaaatggtccctgcattttttataatgtcgcaggctattatgatttgttacaacaatttttagcccacatggtcagtgaaggttttttaacacaggtcgattttgaaaaatacttatttaccgattcgttgagtgtgatggcatcctttatcaaggattaccaaccgccgaagattcgtgaatactaattgctagggtttgagttggccgggggtcacttaggcccttcttttacgctttttggctgctggctgtttcacgattcggattttatgttacaatttaacaagcaaatatacgttctcgtaaagtaggtaaatttatgtatgaatatttaaaaggtttggtgacggcggttagtccgtactatgtcgtcttagaagttcaaggcgtcggctatcaattgcaagttgctaatccgtatcgttacaccgaatcaacgaccgatatcgttcagatttatgtctatcaagcggttcgtgatacggatatcacgttatttggtttttacgatctagatgaaaagcaaattttccaaaaattaatcagtgtttctggaattggtcctaagagtgccttggccatcttagccaatagcgatcattctgggttaatccaagcgattatgaatgatgatgtgagctatttgaccaagttccctggggttggcaaaaagactgcccaacaaattgtcttagatttaaagggcaagctcggcgatttggaacaaaccgaaacgatcgctggtcaaacggctatcgaacttggtacgcctggtgaatcaccagaattaaacgatgcgttagcggcattaaccgcgcttgggtattcagcccgcgaagtcaaagcgattaccaaaacactggctgatttcaatgcacaaactacggatcagtacttacgtgaaggtttacgcttattaatgaagaaataaaggaggactaatggatggcagaagaacgaattgtttccgcagaaaacgaagatttcgcagaaacaagtattgaaaagacgttacggccacaagtcctcgcgcaatatatcggtcaagaccgggtcaaaaatgagttggcggtttatattgaagccgctaaaaagcgggaagagtcgttggaccatgtgctattatatggcccgcctggtttaggtaagacgaccttggcgatggtgattgccaatgaactgcatgttcagattcggacgacgagtgggccagcaattgaacggcctggcgatttagtcgcgttgttgaacgagttacaacctggtgatgtgctatttatcgatgaaattcatcgcttgccgagagtggtcgaagaactactttattcggcgatggaagatttttacatcgatatcgtggtcggacaagggccaactgcgcacccggtgcatttcccattgccaccgtttaccttgattggcgcaacgactcgggccggtttattgtcggcaccgttacgtgatcgtttcggaatcgtcgaacatatggcatactatgatgaagatgatttggtcgatatcgttgaacgctcggcagatgtctttaacatggccattgtccaagaaggcgcgcatgagattgcccgtcgttcgcgggggacgccgcggattgcgaaccgcttattaaaacggattcgcgattacgctcaagtggcggaccaagcggcaattgatcaagcgattgccgaccatgcgcttagtcaactacaagtcgatgtacgtggcttagatagtattgaccgcaagattctccagatgatgattgactattatcatggcggtccagtcggtctaaagacgattgcggctaatattggtgaagaaaatgaaacaatcgaagccgtttacgaaccgtatttattacagattgggttcttaaaacggacaccgcggggacgtgttgtgacgcccgctggttatgaacatctcggtattccctattcagaaaattagaaagaggttacacaatggtttcaacagaagattttgattataatttaccagaagaattaattgctcaaacaccgatgattgaacgggcagcgtctcgtttattggtgatggatcacaaaacaggcgcactagaagataaagttttctacgacattatcgatgaattaaatcccggcgatgcagttgtcatgaataatacacgggtcttgccagcacgtttatatggtgtgaaacctgatacgggcggccacgaagaagtcttgcttttaaacaacacgcatgacgatgaatgggaagtcttgatgaagccagcacgccgggccaaagttggtaccgaagtcgtttttggcgatggtcaattaaaagcagttgtgaccaaggaactcgaacatggtggccgcatgattgaattcaagtatgacggcatcttcatgcaaattctagaagctttaggtgaaatgccattaccaccatacatcaaagaaaaattagatgatccagaaatgtatcaaacggtttatgctaaagaacctggttcagctgccgcaccaactgctggcttccactggacagaagaactcttgcaaaaagtgcaggataaaggcatcaaactcgtgtacttaacgttgcatgttgggttgggaactttccggcctgtttcagaagacaacgtggaagatcacaaaatgcacagcgaattctaccgattaacagaagaagctgctgcaacgttgaatgaagtcaaacaaaatggtggccgcattgtggcaacggggacaaccagcattcggacgctagaaacaattgcgacgaagtttgatggtgaactcaaagctgatagtggctggacatcaatctttatcaaacctggttatcaatggaaagctgttgatgcattcatcacgaacttccatttaccaaaatcaaccttagtgatgttggtcgcttcatttaccggtcgcgaaaacatcttaaatgcttatcaacacgctgttgatgaacggtatcgtttctttagcttcggcgatgccatgtttgttaaataattcgacaaaaatgaggtggcagcattgatgtatttgagaaaagcaacgtttacagatttaccgcggattttagagattatcgaacatgcaaaggccgccttaaagaatcgccagataaatcaatggcaagcaggtgaacctaatcaaactcagtttgaagacgagattcgccaagaattatgttacattctgatggctgatcaacaggtgattggggtcgcctcaattctagcaactgaagatcctggctatgcagcaattaccaatggtcaatggcaatctggttcgacaccttatttttcaattcaccgcgtcgcacttgatagtgctttccacggccaacatctcgggacacagtttttaaccttattggtgaccgctgccagtttacgaggcgcacatgatttacgcatcgatacgcaccctgataacttggcgatgcaacatatgattcaaaaagtaggctttcaatatcgtggtgacatcttcattgcaaacgatccgtcaccgaaacgctatgcgtaccaattattactgaaccaacaataatcctagaattggagtcgattaaatggaaccagcgatcaagtatcgtctaatcaagaaagaaaaacataccggggcgcgccttggtgaaattgtgacaccacatggcacgtttaaaacacccatgtttatgcctgttgggacccaagccagtgttaagacaatggcgcctgaagaattaaaagaaatgggtgccggcattattttatcgaacacctatcatctctggttacgacctggggaagacatcgttgaaaaagccggtggtcttcataagttcatgaactgggaccgcggtgtgttaaccgattctggtggtttccaagtgttctcacttgcgaaattacgggatatcagtgaagaaggggttgctttcaagagtcatttgagcggcgaaaaactgttcttatcaccggaaaaagcaatccaagtcgaaaatgctttgggtgccgatatcatgatgagtttcgatgaatgtccaccattctttgaaagttatgactacgttaaaaaatcagttgaacggacatcacgttgggctgaacggggcttgattgcgcatcaaaacccagcaacgcaaggtctatttgggattgtccaaggggccggctttgaagacttacgccgccaaagtgcgcgcgatttagttgggatggacttccccggttattcaatcggtggcttatcagttggtgaatcaaaaggcgaaatgaatcgcgtgcttgatttcacaacaccaatgttacctgaagacaaaccacggtacttgatgggcgtcggttcgcctgatgccttaatcgatggtgtgattcgcggtgtcgatatgttcgattgcgtgttgccaacccggattgcccgtaatgggacaacgatgacctcacaaggccgattagtggttaagaatgcgaagtactcagaagacttccgcccattggatcctaagtgtgattgttatgtctgcaagaactacacccgcgcttacattcggcacttgattaaagcggacgaaacgtttgggattcatttgacgagttaccataacttatacttcttgattaatttgatgcatcaagtgcaagatgccatcgaacaagataatttattggaattcagagaagcgttcttcgaagaatatggttacaatgaaaagaacactcggaatttctagtgaatcactggaagttgcttgataagtctgatagagttagtaatagacaaaattgaaaagaggttttttaaatggcaaactttgtgttaggtgccggcggttttaatcccagtttcttcgttatcttaattttaatgatggcaatgatgtatttcatggtaatgcgcccacaaaagaaacaacaacaaaaacaccaagaaatggtgaaccaaatgaaaaaaggcgacgcagtcatcacaatcggtggtctacacggtgtgattgattctgttaatacagatactaaaatcgttgtcttagattgtgacggcgtttacctcaagtttaacttgagtgcaatccggacagtaacaccaactgcttcagaagccgcaacagtggttgaagaagaaacggttgaagaaacaaaagaagatacaaaataattcagagagcgctcgattgaatacttcaaccgagcgcttttttatttgcattatatagtgaatttattatcaaaagtaggcttttaaaagataaatcgcctttaactaagaaataaaatttgtaattataatcacaaaacagtttacaaacaactcaaaatgcgctaaactaactttgttaaataaatcacaatagttaattggcatggagggaatcgatatggttaagaaagcagcagttgaaacggttgaaaacacagtgaatgaaatggtcaccgatttagtgacgcgtgcacaacgggcattagcaattttggaaacattcgatcaagccaagattgataatattgtccatcaaatggcgattgctgggttagaccaacatatggcactcgctaagatggcggttgaagaaactggccgtgggatttatgaagataaagccatcaagaatatttttgcaaccgaggaaatttggaatgcgattaaagacaataaaacagttggtgtgatcgaagaagatccagaacatggcatcactaagattgcagaacccgttggtgtcattgctggtgtaacaccagtcacgaatccaacctcgacgacgatttttaaagctgagatcgcgattaaaacgcggaatccaatcatctttgctttccatcctagtgcgcaacgttgttcggctgaagcattgaatgtcattaaagctgcagcggttaaagccggtatgccagcagatgcactcttatatatcgaagaaccaagtattgcagctacccaggctttaatgaaccatgaaggggtcgcaactgttttggcaactggtggtcctgggatggtgaaagccgcttattcaactggtaaacccgcactgggggttggggctgggaatgcgccagcgtatatcgaagcttcggcgaacatcaaacaagccgtcaatgatttaatcctctcgaaatcatttgataacgggatgatttgtgcttctgaacaagccgtaattgttgatgctgaaatttatacggcagtgaagaaggaattccaagcacaaggggtttacttcgctaaaccaagcgaattatcagcactcaatgacgcagtaatcgacccagataagaatgcggtccgaccttcaattccaggccaatctgctgctaaaattgccaaactagctgggatcgatattccagaagatacgccagttttaattgctgaaattaaaggtgttggacaccaatatccactctcacatgaaaaattatcacccgtacttgcgatgattaaagctaaagatcgcgaagatggcttgcaactctgtgaagcaatgctagatcttggtggtcttgggcatacggcttcgttgcatacaacggatgaagctttaccactcgaatttgcaaaacggatgaaagcatgccgggtcttagtgaatacaccatcagcacaaggtgggattggtgatttatacaatgacatgttaccatcattaaccttaggctgtgggtcatacggccataactcaatctcccacaacgtttcaacgatcgatttgttgaacgtgaagacgctaaccaagcgccggaataacatgcaatgggtgaagttgcccagcaaaatctattttgaaaaaaattcagtcaactatttagaaaaaatggcggacttgcataaggtttttatcgtcgctgatcaagggatggtcgacttaggttacgtgcaaattgttgaagacgtcttggcgcgccgcacagatcaagtgcaggtccaagtatttgccgatgtcgagccagatccatcaaccgataccatttataaaggcgccgaagtgatgaaacgcttcaaacccgatacaattgttgctattggtgggggctcagtcatggatgcggccaaagggatgtggttattctatgattcagaagatgccgacttctttggcgctaagcaaaaattcttagatattcggaaacggacttacaagttcccaaacctcgatcggacgaaactaatctgtatcccaaccacttctggaacgggttctgaagtaacgccgtttgcggtcattactgatagtgaaacgcacatcaaatatccattggcagattatgcgttaacaccagatgtggcaattgtggatagtcaattcatcgaaagtgtgccaccccgcgtggttgcgcatactgggatggacgttttatgccacgcgactgaaagttacgtatcagcgatggcgtcaaattatacaaaagggctcagtttgcaagccattaaattagtgtttgataacttacaagcgagttatgcgggcgataagacagctaaagccaatatgcatgatgcgtcaacaatggcgggaatggcgtttgccaatgcgctattaggtatcaaccattcactggcgcacaaactgggcggcgcgttcaatttgccgcacggattgatgattgccattacaatgccgcatgtcattcgctataatgctaagacaccaacgaaacgagcactctgggctaaatacagttacttcagagcagatgaagattatgctgaaattgcacgttatctcggtttaccaggtaaaacgactgaagaactggtggccgcttacgcagatgctgtgactgcattggcggaaagtatcggcatcaagatgcgtttacgtgataatggcgtgacaaaggccgactttgatcgccacgttgatgatttagcagaactggcatatgaagataactgtacggtaaccaatccaaaagaaccattaattaaagaattgaaagggattctcgaagcagaattctagcaaattgaccaagtgatttgctagaataagtggtttgagaagcccgaccacaaatttaaggcggtagactgaaacaaatcggtctaccgcctttttttgttgctgaaaagagattaattttttactatttaagggactaaattgaagcttgatggtatgaaaattattacaaataaggcataatagaaagtagacattcatttagttcagggataactaagaaaagtttgtcgacaaacttgattaaggatctggatggcaatgacacccaataaagaagactatttaaaaattatttttgaacttggtggcgacgcaaagaaagttaccaataaggaaatactagcgggattgaacgtttcggcggcatcagtcacggaaatggtcaataagttagtgaaggaaaactacgtcaaccacacaccttaccaagggattcaactaacaagtgaaggcgcccgcgaagcagccctattagtgcgcaatcatcggttatgggaagtttttttagtcgacaagttacattatcaattcaatacggtgcacccagaagcagaacaactcgaacatgttactaatcacgacttggctgaacggttagctgatttcttggggcatccaacgcgttgcccgcatggtgggattatacccaatgccaagggggaattcgaacaacaaagtcacatcgcacttgaaacattacaagtgggtgaaacggcgattatcgatcgcgtattggatgataatgacttattaaaatatacactggaaatcggcttgtcagtcggtgacagtgtgacgctccaaaaggttggcctcttcgaaagtccgttgactgtttttaataatacgagtcaaacagaaatccaaatcggcctcaaagcggcacaacacatctttgtgacgccacaaaattaatttatatgaaagtggtgtgagatatgcacacagatttagcagcactctttattatttttggtggttccggggacttagcccaacggaaattataccccgcattatttaatttataccggaagggttatttaaaagaacacttcgctgtcattggaacagcacggcggccatggacggatgatcattatcacgaaatcgtcatgacagctttggacaactttgatgaagatcaagcaactaaagaagctttcgtaggtcatttctattatcaatcacatgatgtgacggacgccaagcactacgaaacattaaaggctttagcaagtcagttggatgaacaatacgaattacaccaaaatcggatttattacatggccatgtcaccacggttcttcgggacaatcgcaagtcatctcggatcagaagcgctcctaacggcggatggctttaaccggttgattatcgaaaaaccatttggtcgcgattatgaaagtgctaaggcgcttaaccaagaattgacgcaaacctttgatgaagaccaaatctaccggattgatcactaccttggtaaagagatgattcaaaatatcgttgctttgcgttttgggaacggtctattgagtggtgtatggaataatcaattcattgataacgtccaaattacgttggctgaatcagtaggggttgaagaacgcgctggctattacgaaacatcgggggccttgcgcgatatgttccaaaaccatatcatgcaagtgatcggaatgcttgcaatggaagtgccggttaactttacggcagaagatgtgcaacgtgaaaaaacacgtcttttcagaagtattcaaccttactcaccagcagaaatcaaacaaaactttgtgcgcgcccaatatgctgaaacatcggtggatggcgaaaacaagccggggtatcaacaagaaaccaacgttgcgcctgattcacaaaccgaaacatttgtcgctgggaaagtgatgattgataacgaacggtggtgtggcgtaccattttacgtccggaccggtaaacgattggcacgtaaagaaacgcaaatcaatatcgtcttcaagaagactggcgtcaatatttttgctgatgataagtcagattgttcagcaatggcacctgatgtcttaacaatctatgtcgaaccggaacaaggcttttcattaacgattaatggtaaagaagtcggtcaaggattcgccttgaaacctgatcaattggcttaccaatatgatgaacagatgttggctgacagtccagaagcttatgaacgtttgattttagaagcgctcaatggggatggcacgaacttcacacattggcatgaattagccgcttcatggcaatttgtcgatgcgattcgtgaagtctgggatgcggatcaaacgccactaccaggttactcaatcggttcaatggggcctaaagaagcaacagatttactggcaacaacaggggccgaatggatttttgatcccactcaaaataattaaattaaacaagtcagcaaagtctgtgtatgagatgctcatgccaggcttttcttattgaaagaagtacgtcatcaacgggtaacttctgagcatttacagcacttgacgaattggcgacggaatcgccgatttggcaagtgaggtaaagcggaagaagttgttgataaaagcacgttaaaggaagaagtgcgttaattcgcggttagcctttgagcatttgcctagtcagacggataagcgccaagggcgattatttggctgatgtagcaaagcacagaaggttacgaattaaaagcacgttaaaggaagaagtgcgtcaaaagcggaacaatgtgcctgaaaaagcatgttgaaaaaattaaggaggggtaacatggcagagctgttcaagattccattagaaaatgatacgagtcgcaaaattattcacattgatatggacgcgttttacgcatcgattgaagagcgtgaacagcccgacttacgccaaaagcccctcgtgattgcccgtaatccgagtgatactggtggcaaaggggtcgtgacgaccgcgaactatgttgcccgacaatacggtgtgcactcggcgatgagtgcgcaaaaagcagctgaactgattccgaatcaccaagccgtttttaaggcgcccaattttccgctttatcaatcggtctcggaacagattcacacgatttttcatacggtaaccgataagattgaaccgattgcttttgatgaagcgtaccttgatgtcacggaaaataaactcggcttggcacacacaattgatgtggtcgcctacattcaaaaagaaatccttaaagaaacccaactcgtcagctcggcggggatttcgtacaataaattcttagcaaagatggcatcggattaccgcaagccagcggggcggacactcgttttgccggaacaagcgattgcctttttaagtcgcttgccaattgaaaaattccgtggggtcggtaagaaaacggcgccgcgaatgcaagaactcgggattttaacgggggcggacttgcttgaacaatcagaaatgatgctgatgcaaaatttcggcaagcttggctacggcttatatcggcacgtgcgcggcatcgataatcgcccggtcgcctaccaacgtgaacgcaaatcaattggcaatgagaatacttacgggcaacccctaatcagtgaagagcaggtgcaagttgagttgaagaagttagcgattgaacttgaacggcgtttacgcaagaatcaaaaacacggtttgacagttgttttaaaagtgcggaatcgccaatttgaaactattactaagcgtaaaacatttaacgaatatgtcggcaaggcagctgaactcgaggcgatcgcttgggaaatttggcaaaccatcggccatgcagaagatggcgtgcgcttgctcgggattacggtgactaacttggcaccgcaaacatttgaaaacatcacgttaccgttatacgattgggagcgtgaatagttgagtttcctttgtttttgtgcgctaaaaccgatatactattaataactatgtaaatctgataaagggtggtggcgttgagtggcaactaagcatgatcaaattttaatgtacatcgaaaatttaccgattggtgacaagatttcggtgcgctcaattgccaaaacactctcggtaagtgaaggaacggcttatcgcgcaattaaagcggcagaaaataacggcctggtcagcacaattgaacgggtcggtaccatccgcattgaacagaagttaaaggggaagattgaaaatctgacctttgaagaaatcgttcaagtgattgacggcgaggtccttggtggccgcgctggtttagacaagttgttggacaaatttgtgattggcgcgatgcaaatcgatgccatcacgcgctacattacgccaaagtcattgatgattgttggtgatcggacggatgtgcaacgtttagcacttgaaaacggggccgctgttttgattaccggcggttttggcacttcggcggacgtcattgcattggccaacgacttggctttaccgattttgcaaactgcctacgatacctattcggtggcggcattgattaatcgggcgttgaccgatcaattgattaaaaaagaaatcacaacggtggctgatatctaccacccacttgctgaaatccacacgttacatgctaatcaaacggtggccgactacaagcaattgagtgcggcggtaaaacaatcgcgttttccagtcgtcaacgaacatatgcgcctcgttgggattgtgacggtgaaggatattttagataaaccggccacgatgaccttggataaagtcatgaccaaggaacccgcgagcgttaaaaaatacatgagtgttgccagtgtcggccattcaatgacttggaatagtttagaagtgatgccagtggtggcggacaatttagaactagaagggttaattacccggcaagatgtcatgagcaacatgcaaacggcgcaacgccaaccgcaagtcgccgagacgttttatgatcagattgtcgaaccactgcgtcctagtgaaactgtcccagacttttatacggcggcatatgaatatgaagtgacgccccagatgacgaataacttagggacaatttcgtttggtgtactgaccgaagcggtttcggcagcttgtcaacaaatgctccagacgcaacatcagcgctattcaatgattgaacagatcaacctccattatttacggttgattcaaatcgacacgcagattcagattttaccacgcttgctcgaaattggacggcgttcagctaaaatcgatgtcgatgtttacgccaatcatgtgattgtggctaaggccctcgtcactggtcaactcttagaaagaggttaataaatgacaactccagaacaaattattgctaaaattgaaacttacgatacgattatcatccatcgtcatgtcaatcctgatcctgatgcgattggctcacaagttggcttagctgaagtactgcgtaacagctacccagacaagacgatttaccaagtcgggagcgacaccggtaacttggcatggctcgcaaacgttcaagaaattgaaccggctgcttatcaaggtgcattagtgattgtgactgatacagccaactcacctcggattagtggtgagacgtttaacttaggcgctgaattaatcaaaattgatcatcatcccaacgatgatccttatggggatttaaactgggcgttacctgatgcctcaagtacctcagaaatcattattgacatcgtcaataacagcgaaggccacttacaattcaatcaagcagctgcgcgtgttttatatgccgggattgttggtgatacgggacgcttcatgtttaattcaaccagtccacataccatggaatgtgccgcccaaatgatgacgtttgatattcaccatgataagctcaatcaaaagatgaacgaaatcacgttggaacaagccaaattacaagggtacttattcgatcaacttcaagtgaacgaccaacaagtcgcctacttagtggttgatcgcgcaacccaggaccggttacatgttgaaccgcaacaagtacactcgattgttggaacacccggtcgtttgaaaggggtattaacgtgggtcatcttcgtgcaacaagcagatgacacttaccgcgtgcatttccgctcaaagggcccaatcattaatgaactagcgaagcaacatgatggcggtggtcatccactcgctagtggcgctaaggcagctgatcaagctgaaatcgacataattattgcagaattatcagcgctagccgcgcagtacactgaatagacgcagatccagatttaccggattcaaacaatagaaagcaggactttatggataatcaatttacacaatttaatctaaaacccgaaatcattgcggctttagacgacatgcactttacaaaacccacggcggttcaacggcgtgtgattccagccatcaacgctggtaaaagtgttatcggtcaatcacaaacggggagtgggaaaacccacgcgttcttattaccccttttaaataaactggtgcctgaaaaagacgaagttcaaatcgtcatcacagccccaagtcgcgaattggcttaccaaatctatacggctgccgaattaatcactcaacacatgacgggggatattcggattggtcgttatgttggtgggactgacaagcaacgccaaatcgaaaaactcgaacaacatcaaccacagattgtgattgggactcctggtcgaattttagatttaatcaagagcaaggcgcttaagatttatacagcgaagatcttggtcatcgatgaagcggatatgacacttgacatgggctttttgaagccagttgatgacatcgctagtcgtttgccagaagacttacaaatgatggtcttctcagcaaccattcctgataagttacaacccttcttacaaaaatacatgcacaatcctgtgattgaagaagttaaaaacgaaactgtgattagcccaacaatcgacaactggttagtgccaacgaaggggaaagccctcaaccaaaccatttattcattattgacgatgggccatcctttcatggtcttggttttcgctaatacgaagagcaaggttgatgacatccaccgttatttacaatcacaaggcttgaaagtcgctaaaattcatggcgatattccaccacgccaacgtaaacggattatgaaagaaattcataacttagactatcaatatgttgtggcaactgatttagcggcccgcggtattgatatcgaagggattagcatggtcattaatgctgaagtcccacgtgaagatttagaattcttcattcaccgggttggtcggactggtcggaatggtcttaaaggaaccgcgattacgctttatggtccagatgatgaacaagccgttgcacaaattgaagcaatgggcatcaagttcacaccaaagacatttaaagatggcgaattggtcacatcatatgatcggaaccgtcgtaaaaaacgggtagctaccacgcatgaattagatgtcggcatgaaagggatggtcaaaaaggccaaacttaaacgcaaacccggttataagaaaaagattaaagcagccattaaacaagatgcacaaaagaaacgccggattgaacaacgacttgaattacgtgaaaagaaacgtcaaaacaagaagcaaaatagctagttaattcataatcgaggtggctgtgatgcatgaaaatgacttacaattactgaactggttatcgttatccgaagaagcacggcgcgctaattttggccaggtgttgcgctactttgttagcccgctgattccaattgaagcgattcagagtgagaccgcaacgattggcactcaagtatttcaaacttacagtgcccggctagctgggcagcagtttatttttatccccggccaagctaaggtgcagttgggatggcaagcaggggcagcccacttagcaccgagtgagtggtttgcacaaactaaacatacgttaccagttgatcaaggactcgtttgggcgacgcaagcggatgtcgatcaatacgttgatcagatgacatcagaatatcggattgttaatatggcaccgatgttagtggcacaaacaccaatttcaagtgagtgggtactccaaggcgagtatgaaacgacaacaggacgttttaatggaaaccaactagttgggcgtcagtttttggcggaaatccaaaataccttgtttcgggcgcggcgggaacaaaattcagctgaaacacttgaaagtgcgcacctaattttacaagcgggtgggcgaccagattgttaccaagtgtttgaaaaaactaatggtgatgaaagtgaactacgccagacattgcggcggcgcggttttgatctggtgagtgttgatcagtatgaatggcttaaaggtgcagggagtaagacgttgtggttaagtggtaatcacttaccacgaccgactcagcgccagcagatgccatttgggttacaagcaacagccgctgacggttatgaacttactcaagatccacttgtttataagggtggtgcttgtgtgacagggggacggtatagtttggaacaatggttgcctgaagcacccgcctatgaatctgggattcaaacggcggcattgggcaatccgacgcttcagtgctactatcggcctgcgattaccgttaccttggattagttgacaattcagcaaatcttttttatactttggaagtgttgggatatacgcaacgaactgacggagacaggaacgcctttctagactgagagaaggtgccgccattggttgacgtgctccccaacatcacaaacaattcaataaactcataaagaggttaacgactaacatcgttgcaatcaaggtggtaccgcgcttttgcgtccttgaaattgcagcggtgttttatttttttgaaggagcaaacatgatgaaaaaactaaccagtgcgcaagtgcgccaaatgttcttagatttctttaaagaaaagggtcatgatgtcgaaccaagtgcatcgcttgtcccagatgatgatccgacattattatggattaactcaggggttgcgaccctaaagaagtatttcgatggtcgcgttgtacctaataatccacggattaccaatgcacaaaagagtattcggaccaacgatattgaaaatgttgggaagactgctcgtcaccatactttcttcgaaatgctcggcaacttttctgtcggggactatttcaaagaagatgcgattccatgggcttgggaattcttaaccagcgacaagtggattggtttcgatcctgaaaaattatacgtgacggtttatcctaaagatcaagatgcgcaccggatttggcatgaaaaagtcggtttgccagaatcacacatcattgaagttgaagataatttctgggatatcggtgaaggcccctgtggccctgattcagaaattttctacgatcgtggtcaaagcttcaacaacgttagcgaagatgatcctgaaaactatcctggtggcgaaaacgaacgttatctggaagtttggaacatcgtgttctcagaattcaaccatttaccaaacggcgaatatgttgaacaaccccacaagaacattgatacggggatgggcctcgaacgacttgtttcagtgattcaagaagccccaaccaactttgaaacagatttattcatgccattgatcgaagcgacagctaagatgagtgaccacaaacaatacggtcaaaatgcagctgatgatatttcattcaagattatcgcagatcatgcgcgggctgtgacgtttgcaattggtgacggtgcaatgccggccaatgaaggtcgcggctatgtactccgccgtttaattcgtcgggccatcttaaatggtaagaaactcggcatcaacgacgctttcatgtacaagttagtaccaatcgttggtgaaatcatgaaaagctattacccagacgtattagcacaaaaagaattcatcgaaaaagtcatccgttctgaagaagatcgtttccgtgaaaccttgaatgatggtttacgtttattgaaccaaacgattgacagtgtcaaagctactggtcaaagtgaaattgctggggcagatgctttcaagttatttgatacgtatggtttcccaatcgaattgacaactgaatatgccgaagatgaaggcttaacggttgatcaagctggtttcgaaagtgaaatggcacaacaaaaatcacgtgcacgtaatgcccgtagtgatgaacaatcaatggggatgcaaaacgaacttttaatggatatcaaagtggaaagtaccttcactggttatacaacgcttgaaacagaaagtaagttaagcgtcatcttacaagataatgccgaacaacaaacgattaagagtggtacggcgcaattaatcttcgaccaaacaccattctatgctgaaatggggggccaagttgctgatcaagggatcattaagaacctagctgggcaagtagtcgctaaagtgactgacgtgcaatacgcaccaaacgggcaaccattacacaccgttgaagtgctcgaagaaatgattagtggtgtccactatgtcttatcagttgatccaaccttccgcggtggcgtcattaagaatcacaccgcaacgcatttattggatcaagccttgcgtgatgttttaggcgaacatacgcatcaagctggttcattggttgaacctgactacttacggtttgattttacgaacctcggtcaagtcacaccagatcaattagccactgtggaaaaaattgtgaacgaaaaaatttgggctgcactacctgtgaatactgttgaaaccgatattgaaacagctaaacaaatgggggccatcgcactctttaccgaaaaatatggtaagacagtccgagtggttcaaatcggtgattactcaatggaactttgtggtgggacgcatgctgctaacactgctgatcttggtctattcaagattacgagcgaatctgggattggtgccgggacgcgccggattgaagccgtgacttcaaaggcagccttcaagtatttgaatgacaaacaagccttgttaaatgaattagctggtgaattgaaagttgctcaaaccaaggatttacctaagaagattcaacaattacaatctgacttaaaagcagaacaaaaagaaaacgaacaactcaaagcaaaatttgcccaacaacaagctggcaatgtttttgaaaatgtcgaaacagttggtcaatggcgcttagtggctgctgatgcaaaagttgccggaatgaacgaattacgacaattagcggatcaatggcaacaaaaacaaatttcagatgtcttagtgctcgcaacagttgcgggagataaggttagcttgattgtcgcggtcgcacctgatgcgattaaagcggggattaaagccggtgatttgattaaacaaatcgcaccactcgttggtggtggcggtggtggccgtccagacatggcccaagctggtgggaagaatccagctgggatcgcagatgctttggcagctgctaaaacagctttagcgaacgcttaacttataacgggattgtcgtcaattttttattgattgcaatcccgttatttttttgttctttttgttaatcaatttagcgaaatgtgttatagttatctctcatccgcattctgctaagagaggggagagttgtactttgtcctgttttcgagtagaatatggttgtataagtagcgaaaagttgaggtgttgagagatgaatctagataaaacagtccattttgattttggtaaaaatagccccaagaatgttcatgaaacattaacgacggtctatcagacattagaagagaagggctacaacccaattaatcagattgtaggttatctgttgtccggtgatccagcatacattccgcgctataatgatgctcgtaatttaattcgcaagcacgaacgtgatgagattatcgaggaattagttaaaaattatttggataaggaaacgacgaaataatgcgcttaatgggatttgatgtaggatcaagaacggttggcattgcgattagtgatctattgggctggacagctcaaggggtcgagattattcgcatcaatgaagatgaatcagaatttgggttagaccgcgtcaaggaattggttgcagaacatcaagtgactggttttgttttggggttacccaagaatatgaataattcgattgggccacgggcgcttaaagcgcaagaatacggggcaatgctgagtgaacttttcccagagattccggttgattacatcgatgaacgcctaacaacggttcaggctgaacgcatgttagtggaacaagcagatacgtcacgtaagaaacggaagcaagtgattgataagcttgctgcggtgatgattttgcagaactacttggacgcgcacggtcgcttaacacaaggctaataaataaaacaattaaggagttttgatgaatgactgaagataacaagaacatccaccaagatgaagaacaacaaattacactaatcgacgaccaaggtaacgaggaattataccaagtgctctttacatttgattcagaagattacggtaaatcatacgtgctattgtacccaacaagcgctggagaagatgaagaagttgatatccaagctttctcattcacatcagacgatgcaggcgatgccagcaaaggtgacctattcccaatcgaagacgacgaagaatgggaaatggttgaagaagtactaaacacatttttggcagacgacaacatgaaataagtgcgttcaaaccggttatactttgaggactagcatagtcccgtgaatgagcgacgaagtcgatcgtttgcgggacgtagctagccgcagaagtatggtttgaaaagcacgttaaagaaaagaagtgcgtcatcaacggggaacttctgagcatttgcctaacttagcgaattggcgatgcaatcgccgatttgataagtgtagcaaagcacaggaagttgttgatgaaagcacgttatcaccatctatttcaaaaagggtcccgatagcaattaattaaattgcagtcgggaccctttttttatgtggagaaggtgtgggttgaaacgtgctttttaaagctgactcttgtgcttagcttcgtattgcaaacgaccgactttgtcggtcattcacaacactgtgctaatgctcagagtcaacccgctttaaacgcactctataataattttttcgctttttccgtgttaataaaatgcaatttagcgaattcgcctaggtaatcgatgccaccttgtgcgagtaaatctgcggcgatttggttaactgcttgatgattgccgagcggaatttggcggcccgcttttttagacagttcaagcattgataggttggcttggtggcgcgcaatgattgaagcggcagcaacggcgaggtgaaattgttccgccttggttgagaaataaacgttctcgcgtaaaacaaccggttcattcttcaaatagttgtagtaaatgccgcgtggttcgaattgatcaatgaggatgccagcgggtttttcgggttggattttttggaggactttgaggagtgcgaaattatggctgatggccttcattttttcgatgttcattgtggcgtgtacttcattgtatttcggtggcatgatgttgacgatgtgataggggagtttagccatcatcttgattgccatctgatcgatttgtgcatcggttagcgttttggaatccgcgacgcctagactattgacgaacgccagattttcttggctgacatagacggcggcgatggtcagcggaccgaagtagcttccgttaccaacttcatctgagcctaaaacggaccatttggcaaaatcagctggtaaaacatcgcctttggcggctttaggcttagtacggctagcagattttgctttgctaggggtagcggtgccccacttagcagcttctcgttcggcactagcgccttggaaaagtactttgccagatttatagccggtaatgcttagtccattggcttggtgcgcaaaaacggcccccggcggtagttgacggttggttggataatttttttgaatagtagttaattgtgagggtgtcactttaatgactgcttgcatacgattggctccttaatgagtggcaaatgaagagattcggagtaaaattgccactttcccttatttcatgataaaatagttcagttgaactagcaaataaaattagagtgcgactgcagatggtcatactctgagggttagttgcataccgtgaatgaccggcaaggccgatcgtttgcggtatgaaactaaccggaagagtatatctgcaggagtacgttaaaaaaagagtgcgacagcaggcggttatattttgagtattaactggatttgacgaattggcgatgcaatcgccgatttggcaaatttggttaagcgcagaaatatgcctgcaagagcacgtttcaaaaatcagagtgcgcaataagctgggtatcttctgaggattagcatagactcgtgaataagcgacgaagtcgattgtttgcgaggcgtagctaaccggaagaagatggcttatggagcacgtttcagaatactttatccaatcaatcatacacacatccgcgccacaaaacgcgtatctaaggggaactcatgttaagtctaattattatcttaatgctgttatatgccatttacacaggggtcagacgggggtttatcatgcaagccgtctacacgattggctactttatcgtcttttggattgccaaagcgatgagccaaacactagggcctaagctaagtttaatggtgccatacccatcggcaactgaagacagctattttgcatttttccaaaagagtatcgggttatcactcgatgatgcgttttatatcggcgtcgcctttgtcctcgtgatgtttatcggtggcttgttggtgcgcttcatcggactattgttgaattcattgacttatatgccaggtttgaagcaatttaacaaggtagccggtggacttttgagtttcttggtcgtttacgtggggctctttttgctcctctacgtgctggctttagtgccagtcgatggcttacagaagacattggaaaactcgacagttgcgcgcgtcattgtcttacacacaccagtcctcacctctcaagtgacgagctggtggattgctggctaaaatggatagtgcagttggggctgacggaagtcgccccttttttagaaggagctaacttaaatgaatcataaaatattacaaacactagaatacgataaaattaaacaaatgcttcaaggccatgccatcacggcgtttggtcaagaacaaatcacacaattaacccccgctaacgatgcggaattgattcaagaacgcttggaccagaccaaagatggggtcgatattgaacggctaaaaggtggcattcctttgccacagttagataatattcgtccgcacctgaaacgaatcgaaatcggtgcgactttaaacggtaccgaactcgcgcaagttgggcgggttttacgtgcgacttctgcggttgtgcgtttctttgatgacttagaaaaagatgaattaaccttaaaggcgttgccagacttagttgcccaattggtgactttaccgcaactaactgaaaagattagaagttctgttgctgatgatggcgccgttttagacacggcttcaaccaagttgcgtggcttacggactagtttaaaacaattggaaggccaaatcagatcgcggatggcaagttatacacatggtgctaaagctaaatatctgagtgattcgattgtcacgattcggaatgaccgctatgtcattcctgttaagcaagaataccgtggccaattcggcggcgttgtgcatgatcagagtgctagtggtcagacccttttcatggaaccacaagccctcatggaattgaataaccgcttgcgccaattacaaattgaagaacaacaagaaattgaacggattttggcggaattatcggaagccatcatgccagaacgccacaatattttagccaacgctgaattattggggcaactcgattttgtcaatgctaaggctcaacttgctaaagcgttgaaggccactgaaccgctgattaatttagaaaaccatgttgaactcaaacaagcacggcacccattaatcgacccagctaaagtcgttgctaatgacatcgcgattggggcggattatcaggccatcgttgttacgggtcccaataccggtgggaaaaccatcacgttgaaaacattgggcttagtccaagtgatggcacaatctggtttatttatcactgcgcgtgaagagagccaagtcggcgtcttctcggatatttttgctgatattggtgatgaacaatcaattgaacagaacttgagtacgttctcagcgcacatggaaaatatcattcagattcttcaacatatcgatgatcgtagtttggtcttgctcgatgaattgggggcagggactgatccacaagaaggggcggctttagccatcgctatcttggatcaaattgggattgttggcgctgatgtcgttgcttcaacccattatccagaattgaaaatttacggttacaatcggccacaaacgattaatgctagcatggaattcgatattgctaccttacaaccaacgtaccgtttattaattggggtgcctggtcgtagtaatgcgttcgatatttcaacacgacttggtttaccaagtacaatcgtccaacaagccaaacaattgatgaacgatgaaagccaagatttaaacaatatgattaccgatctcgaaaatcaacgtaaggcagccgaaacggaataccaagccttgcgccatgaattatcagaagccactgatttacatcaacagttatccaacgcttatcaacaattcttcgaagaccgtgaaacagaaatgacgaaggcgaaagaaaaagcgaatgcaatcgtcgaaaaagctgaagttaaagcagacaaagtgatcaccaagttgcgggatatgcagatgaatcaaggcgcccagattaaggaaaatcaattaatcgatgcgaagtcggaattagggcaattgcaccaagaaacaaccttgaagaaaaacaaagtattgcaacgggcaaaacgacgtcaaacccttaaagaaggcgatgatgttttagttacttcatacggtcaacgtgggacattagtccggcaaatcgatgccaagaactgggaagttcaaatgggcattatcaagatgaagattgctaatgaagacctcgagaaacaaaaagtcgttgaagataatcgacctcaacgacacgtgacaactgtcaacagcggtggagcgcggcatgttaaagcccaacttgatttgcggggcaaacgctacgaagaagcaatggctgaagtcgatcaatatgtcgatgcggccttgttagcgaactaccaacaagtgacaatcgtccatggaaaaggcaccggtgcaatccgccaaggtgtccaggactacctaaaaggcaatcgccaagtcaaaaaatacgaatacgccccagcaaacgcaggcggtaatggcgcaacaatcgtaacattcaaatagagtgcggaagcaggcagttatacgccgaggattagcataggcagccgaatgaccaacttgttggtcgtgtggctggtgtagctaaccggaggagtatgcctgctggagcacgtttacgcccccaatccaaccagtcctttctggttttgagtgggagtgtttttttaggcttgttaaattaaacggggatgaaatagtccgtttgtaacgaataataagcgagttaagttgttatttacgccatataggagtattataaaaaataatatgttttgtacaattgaatggagggcgaagaataatggttgaagtattgacagataaaaattacgaagaagaaacaaagagtggcgttgtcttgacagacttctgggcaacttggtgtggtccttgtcggatgcaatcacctgttatcgaatcattggcagaaactaacgacaaagttaagttcagtaaaatggatgtggatgctaatccagaaacgcctgctaatttcggaattatggcgattccaacgttagtggttaaaaaagatggtcaagttgttgaaaaaattactggcttccataataaggaacaactagaaacgattttggcacaatataccgactaattatgaaaacacctactattcagtaggtgctttttttatgtgacagcgtgtgacaaaaatgttagtggttgtttaataaacgttgtggtaactttaatgatgaacaaaatgatgaaaatcaaaaagagagagaaagagatggtgaaaaaatgggtcaaaaaatacttaatttttggaataaaccggccgtcaatttcattggcaaaaccataatttattttgttattctgctaattctactttatttatatgattacagtggtatcggtagtcctaaatttatctacaatgaattctaatgaaggagcgtcgttaaaatgaaaaagaatatcattcaacaaattgatgcaattgcaattgaccaaccacaaactgtggcttatcaattaggcacggcgcaacacacttacgccgacttaaaggctgcttcagaccggattgctcatttcattcaaagccaagacttgccagctaaagcaccggtgattatcttcggtggtcaaaacttcgagatggtggcaacttttctaggtgctgttaaagcaggccattcttatattccagtggaacaacattcagatccagcgcggattaaacagattgaatcagtcgcaacgccggctgctgtcctatcatgggctagtgaaacaacaattgatgttaatatgcccgttttcgcagaaacccaattgacagatgtgattgcaaacggagcaaccgattatgatgctagccaaagtgtgcaagggaatgagaatttctacatcatcttcacgtcagggacaacagggttacctaaaggcgtccaaatcagcgaaagcaatttacaaagtttcgttgactgggccaacccagctttcaacgttgcggataacagccgcgttctaattcaggccccatactcattcgatttatcagtcatggatttatttcccgggttatgctcaggtgcaaccctcgtcgttttagaaaaagctgtgacggacaacttcaagacgttatttgaagtcttgccaactcttaaggtgaacgaatgggtttcaacaccatcttttgcagaaatctgcttattatcaccaacatttgatagtgaacatttcccagaattaaaacaattcgtcttctgtggggaagaattaacgcatcaaacagcaacgaagttaatcgaacgtttcggtgatgcgcaaatcttcaatacttacggtccaaccgaagcaacggttgcgatgaccagcatcgaaattacggcggaggtcttagcgacttacgaccgactaccaatcggctacacaaaggctgatactcaaactgtcgtagtggacgaacaaaataatccagtcgcagttggccaacctggtgaactcttaatcagtggcccaagtgtttcaaaagggtacttgaataatcctgaaaaaacagctgcagccttcttcgaaaaagacgggcaacgtttctaccattcaggcgatttggtcacccaaaacgaagatggcttgctcttttataaagggcggaccgacttccaagttaagatgcacggttaccggattgaactagaggaaatcgatcatcacttaagccaattagcagccgttcatcaagcatgtactgtaccgcgctacaacaaagcccatcaagtcacccaattgattgcctatgttgtgccagcagacggtcaagaagcgggcaatgatttaacgaagacgttaaaagcagaactcgctgaaaatacgatggactatatgattccgcaacgatttgtttatcaagaaaaattaccattatccgtcaatgggaagattgatcgtaaagcgttgattaaagaggttaatggcaatgcttaatttacaaccgtacgcgaatccgaactactttctcattctaggtgcggcgttaattccgttagtgattggcttacttaacggcaaacgttggcatgtttatgagacacttgtctcactgctctttttgatcctaatctttgacggggataaggttcaccagggaattgccttgattggttatgtcctgttcgaaggagcactgatttggggatacactgtctatcgtcaaaagcacaacaacacctggctattcgatctggctgttatcttagcgattatgccgctagtgattgtcaagttcgtgccattcttaaatccgggtagtaattcaattcttggcttcttggggatcagttatctgacatttaagtcagttgggatgattatggaaacccgtgatggcagtattaagaaatttgaaccatggttattcttacaatttatgctatttttcccgacgatttcatcaggaccaattgaccgttatcgtcgtttcaaaaaagattacctaaaagttcctgatcgtgaccattatctcgacttactgggcaaggcagtccacaacttcatgttgggctttgtgtataagtttatgctcggttacttattcgggaccgtgttactccctaaagttgcgcatttagcaatggcgagtcgcggtgggttccttgatatctcatgggggcttgttggttacatgtatgtttacagtatgtatttattcttcgattttgcgggctacagtttattcgctgttgcgacaagttatgtgatgggtgttgaaacgccaattaactttaacaagccatttgcatcaaccaatatcaaggaattctggaatagatggcatatgacattatcattctggtttagagattacatctacatgcgcttagtgttcttcttgatgaaacataagattaccaagaacaaggtcctcattgccaatctcggctatttaacactcttcttattgatgggcttctggcatgggttaacatggtactacattgtttacggcttgttccacgctatctggatcatccttaccgatgtctggttgcgtttcaagaagaaacacaaggatcacattatcagcaatcggtggacgaactacttagcaatttttgcaacgtttaacaccgtttgtctcagttttctaattttctcaggctttttggaccggttatggttccactaagacctacacactaaaggagcgatttaatcatggacgtagaaaatacagtagtagaaattttagcagatttaacagggaacgacgatattaaagacgatatggatatggaattattcgaatcagggacattagattcaatggcaactgtgcaaatgttacttgaattacaaggccaattagatattgaagtacctgtttcagaattcgatcgtgaagcatggtcaacacctaacaagatcattgctcgcgtaaaggaattgcaataaaatgtttaaacgtttatggcaaattttcggcccggttttagtggccggtctctgcttaacagccttattactatcacctcttcgattaggacgacctagcgaaaagacgttgtcgacagcggcgacgtcattatccgccaatgtgctaaaaggggaagccatcaaagatgctgcatttaacgacaactacattccgatgattggttcatccgaactatcccgaatggacgcgttacatccatctgttatggcaaacaagtatgattggcaaaataagccattcctactaggggcaccagggactcagtcattgacccactttttatcacttcaagcgactggtaatcacttgaacggtaaaaaggccgtcgtcgttatttcgccacaatggtttgtaccacaaggggtaaaacctgagatgttcgatttcttctattcaccactacaaaccagttatttcttaatccacgcgaaggattctgaaagtacgcggtatgcagcgaaacgaattctagaactcacaagtgatacaaccaacggggtaatgcgggatgcattgaagaacaaagctttaggcatacctttaacggagacgcaaaaagtatacattaataatgtgaaacgcccagcgttacaacatcaagatcaactcttcagccaattattcattcggggtcgtgaacgcgaattgcgtaaaggcttgaaggtgttaccaaaacaacctgataacatgcaacttgatcaagtcgcaacggaattaggacaaaaagtaacgggtgataatccgtttggcattcaaaatagtttttacaaaaaacgggttaaacccaatgttggtaaattgaagggtgaacaaagtcactttaactatgaaagttcacctgagtttgctgatttccaattgatgttagactacttcgcagcccataaagtatctgttcaattcatcattccacccgttaatgcgcgttgggccgcttatacagggctctcacaagcgatgttgaatcgttttgataagaagattcaatatcaattgagaacgcaaggcttcaacaacattgttgatatgactaacgacggtaatgaacaattcttcatgcaagatacgattcatcttggctggcgtggctggttgaaagttgatcaaaaactccaaccattcatgagaacgaaaaaagcaaaagcagtgcactatgacatgtcaaacgacttcttaagtcgcgactggcaaaacgtcagcggcaataacgtccatgactttgattagagtgagacagagccggttatcacttgaggattaacacagaacggtgaatgatagcgaagcaatcatttgacgttcggggttaaccggaaagagatggctcaaggaacacgtttagattagagtgagacagagccggttatcacttgaggattaacacgtttaatatgctaagtattcaaaaagggtaggaacaaaatttaattttgttcctaccctttttttatagcacatgcttatctgtgttttctatgcatttctcgtcgacttggtaagtctgccacgcgggttcttgtgtagtgtggtgtttcttcagaagttggcttgttttctggttccaccggttcaggaacaactggtgtttctggaacggattctggttctagtgtgggagcagccacttcttcaggggctgcttcaacaggttgtgtcatcacaggtgctggttcttcttcaacagattctgattcacttggtacagatgcgacttgtgatgcatcaaccgttaaatgaatggcttcgactgcttcgtcttcaattggtgcttttgaatctgtttggacgaaaatcgttacgttttttttattttcaatggttgctttggcttcagtcacaatccgcaattgttgttcgaggatttgggcaatgaagccggcttctaattggaagtcaggagtatcgaaatccgcaatccgtgaagcgacaatcgggcctgttaattcgaagaagtattgttccttcttctgtttcttaagactgagatggccgaagttgatttgttcgaagaaggcacagaggtcttcgaaagaatcgagtgggaattgcaaagcgagttgcttaccggcccaatagctgatggcatcattttcggccccaagaattgatggtaacaagatatcccgtaatgttgcctgtgtcagatatgatgcagtttgtggattttgggcgagttgttcatagcgtgattgagtcacagtggcactcctttatggttcgttttttataagtactcctattataccgcgaaaactctttattttttataaaaattaacgccaactgtgaattgccggccgtgcccgttgttttagttgaattttgcaccgaaaaaagagaaaatagaagttacgagtgtatcctgaaatgaaaagagaaatctaatatgcaaaaacaacccattggttttatggattcaggtgtggggggcctaaccctcttaaaagaggcgcttaaacgtctacccaacgaagacatggtctttatcggggatcaagcgcgcctaccatatggtgaaaagccggcggaaaccgtgcgcaaatttgcgtggcagatgaccaattttctacgggggcaaaatattaaagcattggttgtcgcctgtaataccgcaacggcggccgccttacctgatttacaagcgcaattgacgattcctgtaatcggtgtgattgcaccaggtagccaagcggcattggcaacgacccgtaatcggcatgtcggggtaattgccacgaccggaacgattaacagtggcgcatatgcctatcaactaaaggcactcaaaccggcgacacacgtcacgagtttggctgcgccaacttttgtaccgatgattgaagcaaaccaattgagtggcgaaactgtgcaaaacacggttgacgaaaccctcgcgccattaagcgggacgggaattgatacgctaattctcggctgtacccacttcccattattaaccgcggcgattcaaaagacagttggaccggcagtcacgctggttgaccccgcgcatgccgctgttgatagtttgattcaggcattacaagatcgcaatcagttggtggccgatgcaacagctgggcaactacacacctatacgaccggatctgtaaccaatttcgaagcaatcgcgcgtcaatggttagcaatcccaacccttgaagcccaacaagttatcattaaggaggaaaaaaacgatggtccgaatgaataatcgtgctgataatgatttacggccagtgcaagtcacttggcgttttctaaagcaacaacccgcttctgttctatggcaacgcggtgataccaaagtgctcgctgctgttcaacctacagaaggttccttgcaagtcaatggcaatggcataacagcgcaccaattagaatggttgcaaacgacattacgccccttattggcaaccgaagcactcactatcaccgtaacctgtcttgaagatggtggcggcttattagcagaactcttcaacgctgtttattgcgcactaaccttattaccaaaaggcaaaggccccaaacaagtcgctgcagccgtcacagcagcgatggtcgctggtgagtcactcggtgacccagacgccgcggaaagcgacctagcgactagcttggtgacgatggtggccacaccgcaggaacaaatcatcgcccttgaactcggcggacaacaagcagtcaatagtagtgaattcaacgaacttattttacgtgcgagccaaggtgtgacgcgaaccaatgatcaacgtcaagccagttttgaacgcgccgttcaaccgaatatccaagtggctgataccgatgaacaaacaatcgtgattgccacgaagaatccaggtaaggcccgcgaattcgaatccgtcttcgcagcggaagggattcaaatcaaaacattattagattacccagaattgccaaacattgatgaaactggttcgacatttgaagaaaatgctcgcctaaaggcggatcaaattgcagcgatcttacacttacctgtcttggcagatgattctggtctaatggttgatgaactaggtggtcgtccaggaatttattctgcacgcttctctggtgatcataacgatgccggcaacaacgcgaagttgctctatgaattaacgggtgtgcctgctgaaaagcggaccgcaaccttccatacaacattggtttttgctaaaccagaccgaccagatgaagatttagtcgttgaaggtaacgtgaagggccaaattctaggtattcctcgtggggataacggcttcggctatgacccacttttctacgtgccagaattagatgcaacgatggcccaactcacggtggaacaaaaaaataaaatcagccaccgcgcaaaagcaattgagaacctagaagataaatggaaagaatggatcaaagactagcgtgcgacggcaggatcacgtttagatttggctgatgtagctagccggaagaatatgtcggaagaagcacgtttcaaaaaaacaacgccccttggcgccgaaaggactgtttagtatgcgttttgttgttgtgagtgatagtcatggtgatcgcgatattctcgtgcagttagtggcgcagtatcaagatcaaccagtaaccatgttacattgcggggattctgaattaacaaccgatgatcccttgtttaaccaaatgaccattgtgcaaggcaatatggatttcaatggtcaatttccagcacaagttgttgtcccagttgcaaatgaacgaatcttcttaacgcacgggcacttgtatggtgtaaatggcgatttaatgcggcttttattagcggcccaagaaagccaagctaatctcgcgttctatgggcatacacaccaattggcctgtgaaatgcacgaaggtgtgctgctcttgaaccctggcagcattgcccaaccacgggggcagttccgtgacttgaaagggacatacgccgttgtagacgtcacacctgaccaatatcaaatccagtactacaatcgtcggttcgaacccgtttcgcagttacactttacatttaaacgcgcctaattctaaagactatccaaagtttagtagctatggatggtcttttgtgtttgctctttgttacaatctaaaagtagcattagtttattggaggccaagtgatgatttcagatgcattttcgaacttattattagaaaataaagaacacttcttaattcccggtgaggttgttgcgagtgttcaagaaagcaactccttggaacatgcgtttattctactaaccacggtgaaatattcgagcattcccgtcttagacaaccattcgaagttcaaagggatgttgacgatgccgttaattaccgagacgatgctcggattgaataacctcagtttcgaaaatttgcggaagctgaccgttaaagatgtcatgcaaaccgatgtcgtgacgattagagatccatatgatattgaagaaacgctccatctcttagttgatcacccctatctgcctgtgatttcggatgaaggggagttcacagggattgttacccggcgcgaaatgatgaaaagcttcaaccgagtagcccataatatcgaaaaagaataccaaatcgagccaataaccgcagaaacaacccaaaaaggacaataagggttaaaaaagcgtcttccagacaccaacgaataatgtttggaagacgctttttgttttggactgaatccagcttaattactggtatatcaacatttgtaagcaaaattaagttagacgtaatgactttaaaaaatccatgatagtaggtcataactcatgagttgtgaacctcttatatcgttacatattgttcttgggtaatgatggttagatgactaatattcacccctgcataggcattcttgggagtctagcctagggggaagtagtgataccgtcaaagttatgcctgatgaacatagtcaaaatatcgaaaaattatcatgtaacaaagttttaaaggcattagaactgggaggaaatttgatatgcaaaagagagtcgtccatctaattttagcaattattttcttaaccactacaatcgtacagtcatttggtagcgcattagcggtggctgtgaataaggagacggtgacagccaacacgacttctaagattgtgaacccacgaagcgcaattgaaggcgcgagctcagtttctgaaagcttagccagttcgttgcaatcacaatcgacaagcagtgcttcaacaagctcagatagtaagtcgagttcaaagagttctgattcagaatcgagttcaagtatttctgagaaaaaggaaagcgttaaatcgaccacgagtaaatcggtgattattcaatcacgatactggctttcagatttgactgatccgggcagtgaatatccagacttttcgattcctttatctggtcaaaacaacgttacaacgattgaagatgtagctaaattatttggagagttgtccgagcggccgaaggagcatgattggaaatcatgtaaatgggtctaacctgtttcgagggttcgaatccctcactctccgttaaataataaatgacatggcccgttggtcaagtggttaagacaccgccctttcacggcggtatcatgggttcaaatcccgtacgggtcatttttttggaggtttagctcagttgggagagcgtctgccttacaagcagagggtcacaggttcgagccctgtaacctccattcggtcgcatggtctagctggttaggacgcctgcctgtcacgcaggagatcacgggttcgagtcccgttgtgaccgtcttaaaaaaagcgtaagcaatttattgcttacgcttttttgttgtttaatcattttaattaaagacgccagtgattaatagcaagtatccaaactcttgtaaatagcagttacgtttgattaggccgagttgtaacgcaattaataataactggccacctgcaaagagaattaaatgccaaccgtgaattaaatgcgttaaaatcactgcaataataatgcacgcccatactacataactgaggatagtaatcatccgattgtgagtcgttagttcgagaagataaatgatgattaagaataggcctaattttacgagtaaatcctcggggataaagtgaatgccactgaaaatctgagtaattaaaaagaaaaatggggctagtaagaattgaaatgataaccgtaacgtacggtctttgaactggtctgggtagataaaagggattagaacaaaaatgctagtaatccctgatagaagcccaatcaaaggtagatcacgccagccgatgattgcggctagaataattgcgactaaaagggcagcagttgcaattattcgctttggtttataccggggtgataagacgagtaaaatggctaatagcgcccctagaatcgcagttagataaaatgaaagcccgaattgctttggaaaagaccacattgtcagcccgacgattaaaccgagatttaaataattaaacaaagtcagtaattgtggctgagttgaagcctttagatgttgttggttaaggtagaacaatagcaacacttctttcttagaatatgtgtctcatcttaactttttttgaaaagaaggtcaacggcttttgaaatggattgtattttgtgctaggatagtagagttataagaagttcccgataggattcacacaccgtgaagaggccttgtaaccgacacatatatagggggaaacatagaaatgcaagaaagacatttatttacttcggaatccgtttctgaaggccatccagataagattgcggatcaaattagtgatgccatcttagatgcgatgttagcacaagatccacaagcacgagttgcttgtgaaacaaccgttacaactgggttagtcctagttgtcggcgaaatttcaacaacggcatacgttgatatccaaaaagtggtcagagagactattaaagggattggttatcgtgatgggcattatggctttgatggcgataactgtgctgtgattgttgcacttgatgaacaatcacctgatattgcacaaggggtcgacgattcagttgaatctcgtgcaaaggatgaagatccacttgataagattggtgcgggggatcaagggttaatgtttgggtttgctgtcgatcagacaccagaactaatgccgttaccaattgccctttcacaccgtttaatgcgcaaagtcgctgagttaagaaagagcgggcaactcgcttatctaagaccagatgctaaggcgcaagtcactgttgaatacgacgaaaacgaacaacctgttcgtgtcgataccgtcgttatcagtacccaacacgatgcagatgtgactttagaaaccattcaaaaggatatgcttgaacaagcgattcaaaccgttattccagccaaatacttggatgatcaaaccaagtatttcattaatccaactggtcggtttgtcatcggtggaccacaaggcgattcaggtttaactggtcgtaagatcattgttgatacttacggcggttatgcacgtcatggtggcggtgctttctcagggaaagatgctactaaggttgaccgttcagcaagttatgcagcccgttacattgctaaaaacattgtagcggctgggttagcgcgcaagtgtgaagtgcaattggcctatgcaattggtgtagcgcaacccgtttctgtttcaataaatactttcgaaacagggaccgtcagtgaagaaaagattcaaactgcaattcgtgaaaactttgatttacgaccagcagggattattcaaatgttagatctacaaagacctatatacaagcaaacagctgcatatgggcactttgggcgtacagatgtcgaatttccatgggaacgtttagataaagtggatgccttaaaggcaagtattgctaaactaaatgcctaatgtattattagacgagtaaaagaggcggcctttccttagcttatttgagttaagaaaaggctctttttatgcccaagaataagagagggagctaagaatggaacaaagtaagggaagaaaaacgaatgtattactcgtgacgattgcgattttcgtcgcaactttcatgacagccattgaagggacgattgtttcaacggcaatgccaaccatcattagtaatttacacggtatgaaattgatgaactgggtcttttcaatctacctattaacgaatgcgatgatgacgccaatctatggtaagatggcagatcggattgggcgtaaaccaatcttcatctttggtttggccttgtttgtcatcggatcatccttatgtggattgtcaaatcatatggggacgttaattatttcccgggcaattcaaggcttgggagccggggcgattatgccggtatcatttacgattattgctgatatttatccgattgaaaaacgggcgaaagtcttgggttttaatgggtcagcatgggggattgcctccatcattgcgccgcttttagggggcttcattgttgataagttgacctggcattggattttcttcatcaatgtaccgattgggattattacgattggtttaatctggtacttccttcaagaagagaagaagacgagtgctgaaccagtcgactattggggcagtttatggttgatggcggcccttttgagtttactatatggcttccaagtcatgggtgaagccaaaccgtcagtgctcgttttagggtcaatgctcgtgattgcagtggttgctttttacctctttatccgcgttgaaaaacatgcacaagatccgattatctcattatcattatttaaaaatcgaacatttgttgtccaaaatgcagtggctgctttagtgagtggtttcttaattggttttgaagtctatatgccaatgtggatgcaagggatcctcggattgaaagcctcgatggggggctttgttgtgacgcctagttctgtgatgtggatttttgcctcattatgggcaggcctattacttgttaagcacgcaccacgaacaattctagccggtagtttgtgtattttacttgttgggagcttcatcttagcattggtcccacaaaccacaccgttttggttcttcttattagttgctgttggtttagggattggctttggcttaatcattaccacgacgactgttacggcacaaagcgttgctggtgctgacaaagttggtgttgcaacgtcgtttaatacgttaagtcgaactttaggtcaaaccttgatggtttcagtttatgggattattttgaatcggcaattggcaaaagggattgctggtgatggtcgattagatcaaaacatgttaaatgaattgattaatccagaaactgctttgaacttacctaaacaattattaccaacattacgccatattctatacaatggtttacacttcatttattttgcgtcaattgtgttaattgccattgcaattattattaatttaatggatcgtaaaagaagtaaataaaaaagattgaccaatacggtcaatcttttttattttaatggaataagacacagacgccttcaggtgtttttaagtctttttgacaggcggttaataaaccagtttgggcatcgcgccgataaagcgtaccattatcactattttggttaacggctaatagaaaatcgtcgttagcggaaagattgaagtcacgggggaattcaccatccgttgacatttgttggattgctcgtagttggcgactgtcatcactgatggcatacacaacgattgaattatacccacggttggaagcataaaggaaacgaccgtctttggaaacacggattgcagcgccgccgtttgcttcgtgccaatctgcaggtaacattgagtaggtagcaaccgcgctaaaagtcccatcggctgcatgataatctaagaccgtcacttcactggacaattcacccaataggtaagctgtcttgtgattgggatggaagattaaatgccgtgtgccaaaaccaggttcactcttgtaaattgctactttggttaattgaccagcattgtcgacggcataagttactaattcatcggtgcccaaatcacagaccactaagcggtggtcaggtgttaggtcggtataatgtacgtgggcgctagcttgttcaggacgcggaccgtggccttcatgaactgtcgtgctcgctaaggttaaactgccatcggcttggatttgataaacgagtatttcgcctttatggtaattggctgcataaacgagttggcggtcttcatcgactgccacgtatgctggtggtgcgccggctgctaagaccgcgttcaaaaagacaggggtgccactagctaagtcataggcagcaatcccaccttggtccccatctttaatgacggtgtagaggatgttgcggtttgaaatcgttaaataggatgcgttatcgagattaatgaatggttgaatgtcacttacggttgcagttgttgcatcgaaaattccgcggtagattcctttaccaatccggcgggtataaccaccaattaaaacttcttctgtcataatcagactcccttcgtcaaatactctttgagtatagcatattcctgcgaaaacggtttaatttgttactaaaaggattcactagtcgctaaaactaagtcgcgaatatgctacaatgatactatcttaactaagaggagatttcattatgaacacgcaagcagaagtcatttcaattggcaacgacgccattgatgatcaagaaccgatggtcattttattcgatgaacatgcgacaactgccattcaaaacgtggcattgattcaacattttatggacgaagcggccaaaaaacagctaacactgacgacagattctacggttattattaatcaacaaccttatacgattacgtatgtgggcgcgttggtaaatcctaacctcaacagtattggacatgtcgctttagtttttggacctgcgccacaagaagatcaactgcaaagtgggctttatttaacgccagctgccgccggtgttccggctgttcctgaattcaaagtaggaacgcagataacgtatcaagaaactatgtaggaattaggtgaattggtgtgacagagaataaacagccacaaatagaacgttcatggttctttaaatggtttttaaataagaagctaccgattgttttgttaaacgtgttattaacgttgctgattatacttttattaacaaaacttgcttggctgttaaaaccaattcagtcgttgatgttgattatcgggttaccgattattattgcggccgtcttgtattacttgaccaacccgttaattgattggtttgaacggcgttggcatttaaatcgggtattgtcgattacgattatttttattttaattgttggcttactggtctggggaattgcgacgattattccaatcattcaatcccagacaacgagtttaattgatcagtggccgtcttattgggcgaatattcaaactcagacgatgaaatggtttaacgacccagccttcaaatcgattcaaaaacaattaaacgatatcaatacggatgtgtttagtaatttatcaagtaaagtaaataaaatgctgacttcgaccgttagtcatattggaacagcggtcggagtggtgacgaacgtagtcatcgcgattgtaacgatgccgttcattttattcttcatgttaaaagatggtcaccgaatgaaaggctatttgttaaaattcttcccggttaaagtacgcgccacaactgggaaagtgttggaagaaattaacacacaggtcagtcagtacatccgcggccaattgacagtagcgttttgggttgcagtcatgtttactgtaggctactggattgttgggatgaagtacgggttgacgttgggaattttagcggggattttaaacttaattccgtatttaggctctttcctagcgatggtcccgtcagtgattattgcagcgtttatctcgccgttattattgattaaagtactcatcgtgtttgctgttgaacagaccttggaaggtcgtttagtttccccattggtcttggggagcaagatggcaatgtatccggtcacgacaatcattgtgttgctggcttcaggaaagttattcggccttgccggtgtgattctcggtattccagtatatgcgattatcaagatattaattagtcacctttttgaatggttcaagtcagtttcaggcttatacgagcaataaaaaacgcacgatccgtaataaatgcggatcgtgcgttttttggtttttagagcgttaatttcatgtagtggtgggggatgcccgcttccatttcgccttcgcttgtgacaataaagcctaatttttcgtagaaaccaatggcgtggtcctgtgcgaataaaataatataaggcgttgtggtgcgtttagcgtcttcaatgatggcttcgattaattgatagccgagtccttggccacggaaagctttgatggtagcaacgcgctgaattctaaatccaccgtcttttaagacgtgcacgcgtgcggttactgctgggtcttgattgaggtaacctacatagtgaatcgtgtgatcttcgtgcgcatcgatttcctgggtttccggcatattttgttctcggacaaacaccgttcttctaatgtatgttgcatcacgaaagataacactgttatctccaagtgtatgtttaatatccatttgtttcacacccttttctgatcaatgtagacgctaaggttaaaagcgacacgggtaattatacagttgtttcaagtcggattcaaccatttcagagaagtttttaggtacctaactaaaaagagccaaactaccgatttaaaaggtagtctggctcttttaactgctttttaaagcatgtcaccattaaaaattgaatggcgaacaagaacgtaatcgactttcttcaatgatgataagcgtttaccaccagcataagaaatcgatgattgtaagtcttggcgcatttcggtgagcgtgtcactaatcgcacctttataaggcactaaaatgcgtttaccctcgacgttttggtgtgtgcctttttggaattctgaagctgacccgaaatattctttgaattgttgaccatcttcttcgactaatttgccaggtgattcagcgtgtcctgcaaagagggacccaatcatcaccatgctagcgccaaaacggattgatttagcgatgtcaccgttggttcgaattcccccatcggcaatcatcggcttggtagcagctttcgcgcaccatctgagggctgccagttgccaaccaccagtcccaaagccggtcttgattttggtgatgcaaactttaccagggccaatcccgactttggttgcgtctgcacctgcgcgttccaaatcgcgaacggcttcaggggtaccaacattgccggcaatgacgaaactcttaggcagtacttttttgatatgttgaatcatatcgatcacgacttgtgagtggccgtgggcgatatcgattgtaatgtattctggtagtaagttatcggttgcgagttgattaataaagtcgaattcatcgtctttaaccccgacactgattgaggcaaataagccgcgctcgtgcatcatcttgatgaatgcgggacgcttttcaggctgaaatcgatgcatgacgtagaagtaatggttttcggcaagccagatggcaagcggttcatcaataatcgtctgcatgttagcagggacgactgggattttaaacgtttctgagccaaagcggacgctagtatcaatctcgctccgacttttcacaatacatttattgggaatcagttgaacatcttcgtaatcaaatacgtccattgggaattctccttaaaaacgaacatttattttgggtaacacggaatttatccgtgcataacgtataataacgagcttttttatgaaagtcaaataaaaaacacattcgaacccaaagaatgggagaatgtgtttgatgatagtggccttttgtaagttaaacgagttctaatccgcaggagctggcacacgctctatttaatgtaccgcttgcgccagaagcgatagactagcacaccagaaatgatcagggaaatgaataaagtaatcaaccaacttgttttggagcgagacagtggaaggtccacgttcatcccgtaaaaactaaatactaatccggggatggtgagaataattgaataagatgccaagaacttcataacactattcatgttattattaataattgacgagtaagtatcggctgtttcgttaataattgtgttggaaatttctgccatttcgatggcttgttgattttcaatctgaatatcatcaagcaattcaatttcatcttcattaagatctaacatattggtccgcattaaactagcgagtaccattttatcggtctttaaggacatcatgaaataaactaagccgcgttgaatggtcatcagatcgaagagttcttcattctgtagggaactctgcaagcgagtttcgatttgttcacgagagcggttgatgtcccgcaaatattggagatagatggatgaaatgcggaagagaatctggaggacacttctacggtgattttgtggattgaaacctttaatttggccatcaacaaagctctgtaaaaaggtgactggcgttttgttgatggttaagacggtcgaatctgttacaataattcctaagggacttgttttatagaggtatttatctggtttttgcgggtctttttcaagaattggtatgttgaaaataatcagggtcgcattataatcaggatcgtgctcagcacgcgcactttcatcagcatctaaactatagtagataaaatcagatgggatgtggagcttcttagtgagaagctcaatttcttcagtcgagggatcagttacgttaatccaactgttggactggattttagcatgtttggtgagctttttcttagcactgtcgaagcgataggtttcgagcatggtgtcacttccttcatcaataacttactgttaagtctactggatattttaagaatgtaaagtgcggtataaaagaagtgcgttcaaaccgggtatcctttgaggattagcctaattagacgaataagcggcgtagccgattgtttggctaatgtagctaaccggaacgggatgcttttgaaagcacgttaaatcaaggagaatcagaaatttgaaaaaaattgagttagccaagcagtttttaacgacgaacttggccgtattacaatgtccaatctgtcaggacgtatttgcaagtgtagccgagcaccaattactttgtgtcaatgggcatagttttgacctcgctaaaaatggcacgttatattttttagcaaagcaaatgaagtctgaatataccaaggaaatgttgcaacatcgccgggcttttttacaagcagggttctttcagccgttcttaaaagaaattgcatcacggattacccccgatagtttagtccttgatgtcggttgtggtgaaggaacgccagtgcaacagctcaatgcgcaagtttccgcgcgttatatcgggtttgatatttctaaacctgcgattcaattggcaagtgattacaatgccgatgcgtggttttgtgcagcagacttagcgcggatgccatttgctaatcaccagttagatacggtgctcaatatcttttcgccttcgcaatatcaagaatttaaacgtgtcttgaaaccgggcggtcaactaattaaggtgattcccaatgcgggttacttacatgagttacgggagttactgtatcatggtcaagctaaggaaagctatgatcatggtccggtcttagaattgtttgcgcaacattttccagattatcaagaaatgcaagttcaaaaaacaatgacgttaacacccgagacattgcgcgatttggtcgaaatgacgccattgacgtggacggcttctaaggcacaattagcggcaatcacgttagaagcgctacctgaaatttcattagatgtcacgattttagtgggaaaatgatgagaatttaaagaaagtttaaaaatctgattgcaactctaaaataagggcgctataatgtttttaaggaattttttccctaacttttatcagaatttattttgataaaagctagtgatgaaatgacactaacgtagtttctcgccgtgaataaccgagggactacgtttttttatttgcaaagcaaggtagagcttttgtgaattctattgtataattaatctactgaatcttttttaaggaagtttagaccgtgactaatcatattgtattatacgaaccactgattcctgccaataccggtaatattgcgcggacatgtgcaggaacagatactgttttagatttaatcgaaccattaggctttgaaaccgatgataaacatttaaaacgggctggtcttgattactgggaccaagttaagattaattatcacaagaacttggatgcctttttagcaactgtgcccgatcgtcaatatttatacttgattacgaagtttgctaagcaagcttattctgatcaagatgtgtcggatacaagtgttgatcattattttatgtttggtaaggaaacgaccggattacctgaaactttcatgcgtgaaaatgaagatcagtgtttacgaatcccaatgtccgaccatattcgagcattaaacctctcgaactgtgcggcattagtgatctttgaggcattgcgccaacaagattttccaggactcgaaaagagtcatttgtacgacaatgataaattaaaatagggagtgtttttgatgcaaacgaagaaagatccaattactgttgatgcttttcattatgaccgtgtttcacatgatgtagaaccacaacaaaatatccaagtcagcttagtcaccatcagcgaagaagatccatatttacaagaagctgatttgagcgcggggaatatttaccaaattgtgacgcctttccaagttgcaccagaaaagagtggctttgcagtgtcaggtcaaatttcacaagtggttcaactcttagatttctttggtgaaccaagtgaaattgatcaaaaagacatgatgaagctttcacgaccattgattgaatacatcgaaacattgacgtatcaagtgacggcggttgctttaaatcggggcgttcaactccaatttacagcgcaagccaacgaagactaatcagcgaaaggttgcggcaattttgccgtggccttttttagtaccgtgattaaaaacggtacgggactgacatttatgggtttagtagtacagatgttcgtgtataatggatagtaggatttaaggttgaaggagattttcatggccactaaaagtaaaaaaagaaaaccagcagcacgcaaaaagaaaaaacaacaaactgatttcacagttaacatcatcgggtttatttttattttaattagtttatttgcgggtttaaagctgggctttatcggcgggctttgcgctaacgtattccgtctgtttgttggcgatacattcattattagtgctattttattcgcccttttgggggtctatttgttgatttatggcaagcagccccccttatggcaccaaaagacgcttggatttgcaatcgcgtatctcgggattttaatttggttgtcagcattcgtcttgcaccatcaagcggtcaataaccatttcttggccgccacatggcagcttttattggaagacttccagaagatggccgttacgacggaagttggcgggggcttaattggcgccgcgttgtatggtgttttccacttcttgttcgcgcagatggggacttatctgattgccgtcttaattgtgattatcggcgtttttgttttcttagatattccattcagcgtcgttgttcagagtacacaacggtttgtgcatgggctctttaaagttggtggctacacgaaattagggttccaaaaggtctctgaaaaaggtaaagcgcaagtcagtgctttaaaagaacagacgcaaaaagctgttcaaaatgcaactgaacaagcagaagagacgtcagagactaaagagcaaatggtcgcaacggatggtccagaaaatgcaccgaagcaaaaattggaaccttttaaaataaacggtcccaaggatctaccaaaaccaattgcgacgcaagcagaaccaactgcacccgaaccggtggctgacgaagatgagcatgttccagatgtggcagaactcgcaccactgaacgagacggatgatgattacgaattgccaacaccagcattattaacgcaaattccggcgtctgatcagagtgcggaatataaagctatcgagaaaaatcaacaggtcttgaaacaaacatttgattcgtttggtgttgatgtgacggttaagagtgctagtctgggaccagccgtaacgaagtacgagattcaaccggcagttggggtgaaggtctctaaaattgttaacttagcggatgatttggcgcttgcattagcggcgaaggatattcggattgaagcaccaattccgggtaaaccgtatgtcgggattgaagtgccgaacacgaccgtttcgaccgtttcctttagagaaatgattgaacaagaacccccacatccaggcaaaccactcgctgtgccgttaggtaaagatatttcgggtaaggtcattatgtcggatttagccaagatgccgcatttattaatcgccggttcaaccgggagtgggaagtccgttgcaattaacgggattatcacaagtattttaatgagtgccaaaccacacgaagttaaattgatgttaatcgatccgaagatggtcgaattaaacgtctataatggggtgccacatctattgattcctgtcgtgacgaatgccaaaaaggcggctaacgctttgaacaaggttgtaaaagaaatggaacgacgttatcaattatttgccgatacaggtcagcggaatatgattgaatataatcagtatattcaaggccacaacgaagacggcgaaattaaaggcgcaccactgccttatatcgttgtcatcgtggacgaattatctgatttgatgatggttgccagcaacgaagtcgaaagtgcgattattcgtttggcacaaatggctcgggcggcggggattcacatgattgtcgctacccaacgcccatctgtcgatgttattactgggttgattaaggccaatattccatcgcggattgcgtttgctgtatccagtgggattgattcacggaccatcttagatggcagtggcgcggaaaaactgcttggccgtggtgatatgctttacatgccaatcgggatgagcaaaccattacgggtgcaaggcgccttcatttcgagtcaggatgtcgaaagtatcgtgtcgtttattaaagcacaacaaacggctgaatacgacgaagaaatgattccaaccactgagcaggaaaagcaatcaactgaagaaccagaagatgaatattaccaagaggcagtcgaattggtcgttaaacaacaaaccgctagtgtatcaatgctccaacgccgttttagagtcggctataaccgggctgcacgcttggttgatgagatggaaagccgtggtgtgattgggccatcagaaggtagtaagccacgcaaggtgttattacaaaacgtaccagaagaaccaacagaacaatagcgtgtgacataagtcgaatatcgcctaaaatggcgaataagcgcgtcagcgattgattgacattcaggattaactgaaaggcgctggctgatggaactcggttaaactattaaatgaaaaaggccgcgacaaaaaatacttttgtcgctgccttttttgagttcaccttctttttttggtatgatagaatccgtgctatgaaaaaggataagttgaaaagagccattttaactgttgaaacagtgaggagtaatataacgtgaatcagaaaataacggatggcgtctacctgaatattttacaaactaaccaatttaaaacaattagattgaccgttcaattaattgcccccgtcacagctgatgggatgacccggcgctcattattagcgagcgttctaggtgctagtagccaagcctatcgtgaccaggtcgcaattgcgaatgaattacaagccatgtatggtgccggctttaatatgaatgcctatcgacaaggaaacttggcgatttttagcatctcaatgcgaattgtgagcccccaatatctacgggatacaatcgacttgcaagagcaagcgattgcgtttatcgggcaattattattgcatccagatgtggttgatggccagttcaatccggtcatttttaaccgtgaaaaagagaacttagtgcggtatatcgaaagtgttgcggatgataagcaatcatatgcggcggttgaattacgcaaactctattttaaagatgcaacgcaacaaattcccaattatggggatgcagctgatttagcaaccatcataccggatgaactatatgcgtattatcaatcgatgattgcaaacgatcgggtccaaatgacgtttgtcggtaatatcgacgaagccaaaacggtcgcggatttggcacaattgccatttgcaccgcgtaatgttgaactgccaacgattttttatcaacaatcgttatatccacaagtgcaaactaaaacagaagtacaaacggtgcaacaaggcaagttaaacatggcctatcaaatgccagcttacttctatcaagctgattattatgccacaatggtgatgaacgccttattcggtggcacaccgctgtcgttactttttaccaatgtgcgtgaaaaagcgagtttagcctactatgcctcaagtgcaatcgatgcttttcggggtgtcattacggtacagactgggattgaaagtcgccaaaaagatcgcgtcttagagattatcgaagcccaacgtcaacggattatcgcgggtgactttgaacaggcggtctttgaacaaacgaagttggccttgattaatcaatttaaatcgagtctcgatagtgcggcctatttggggcaacaacaattcaatcgtttgtttgtacctgaaactgaaattgatgcagagcgatttacacaagccatcttggcggtttctaaacaagcggttcaagaacaagccgcaaagatgcaattgcaagccatttacttcctgaaaggggtcgatacagatgaagcttagacaaaatccccgcttaggtgaaaccctctatgaaactgaattagagaatggcttgaccgttaaaatataccctaagagcggttatcataagacatatgcaatcttaacgacgaattatggttcaatcgataagacgtttatcccagctggggaaacggattatgtgacagtgccagacgggattgcgcattttctggaacataaattatttgagaaaaaagattacgatgcgtttgaaaagtttggtcgctacggggcaagctcaaatgcgtttacgagttttacgcgaacgagttatttattttcaacaaccagtcacttgcgagaaaatttggatattctacttgattttgtgcaggaaccttatttttcaactgagacggtcgaaaaagaaaagggcatcattggccaagaaatccagatgtataatgatgaaccggattggcgcttattctatacagtgattggcaatctctatccgagtcatccagtgcggacggacattgctgggacggtggatagtattgcgcaaattacaccggaagcgctctatcaagcacatgcaacgttctatcagcctagtaatatgaacctctttatcgttgggcaaattgatgatccggatgaagtggttgattggttgaacgccaatcaagcggaaaaaacatttgcccaaccaacagaaattgtacgttcattgcctgaagaagctgaagatggtcatgatatcattccgtatcggtcacttgaaatgccaattacgcgtagcaagagcatggtcgggattaaaggtttaacggattacggaacaggtgagttagcacttgaaacaaagttgaagatgaacttgttacttgaattgctatttggtgattcatcaacgcaagtgcaaaagttgtacgatgatggcacacttgatgatagttttggttacgaatttgccattcaacggtcatttaattttgtgacccttggtggcgatgcggacaatgcccaagaattatcggatgcgattattaatatcttagaacatgccacggaaagtcctgacttttcagaggataacttggcgttggttaaaagagccgcaattggtgaatacttgcaagcgttcaattcgctagaagccattgcgaaccaatatagtgatgaattctttaccgaaatcagtccatttgatgtcttaggtttgatcgaacaagtgactttagcggacttgcaacagatggcaaccgattatttcaaaattgaaacgatgacagtctgccacatcttaccggagggagcaaaccatgcctaaatcagccttaattatcggtgcatccggtgatattgggatgacggttgcgactgaaatggcggcggacggttggtcgctttatttacactatcatcaaaatcagacgcgggttacgacgctgcaaaagcaattgttgcaagactacccaaaacaggatttttttgcgcttcaagctgatttaacccaagaggacgctgttgcaaaattgacaggccagctttttcaagtcgatgcggtcatttatacagcaggtgcgacgacgtatggcttattgccagaggtcagtgcaacggcactcgatcacttatggcaggtgcacgttaaagcaccaatgctattgatgcagcagctgcaagcgaaactagcgcaaagtccattaggacgcgtcgttttaattggttcaatctatggtggccggggcagtgcaatggaagtgccatatagtacagttaaaggcgcacaatccgcctttgtgaacgcctatgcacaggaagtggcatcgcttggaatcacaattaatgtggttgcaccaggcgcagttgatacgaaaatgaacaatcagttcacaacagcagaacgggctgctgttgtagcggagatcccggccggtgcttttgcaaccccagcacagattgcctattgggtattgagtttaatggcacctgcagccgattatatgacgggacagacattgtacgttaatggtggttggttaaaataaagaaatcttaataatgcacatacgtaccaatatgctataattatggataatgatactgggataatagtgggtggaattgattatgaatgaaattggtcaaaaattacgtgaagcacgaattgaaaagggctacacactcgatgatttacaacaaatcacaaaaatccaaaaacgatatttaatcgccattgaagagggcaattttgatgccttgcctggcagtttttacgtgcgggcatttatcaagcaatacgcccaaacagtgggcttagataatgatgcattgttggcagaataccaagatgctgtaccagatacgaaaccagaagaatatgttgaaaaatccgttgaaaatcaaacccgattgacgcgcgaaacaacagattctaaatggtcgaaatggcgcaaccttgtcccacaaattacgattgtggcaattgtggtcatcattattggggtggtctatgggattgcgctcagcaaccgtggtaaagaccgcgaaacgttaaacgaaacaagctcatcggttacggtttctggggataaaccagatcctaagaaggatagcagtagtgaagacaagtctgctgaaagcagtaagaaagccgcttctgaaagtaaggcacaagaagctagcaagaaagctgctgaagataaggctaagaagcaagaattaacggcgaagatgaccagcattaatgggtcacaacaagcttttgaaattaagaacttgccagctaaagccaaccaaattacgttctcagctgataaatcagctgcttgggtcagcttaacggccaatggccaacaaatttggcaaggttctgtcgcagttggtgccgaacaaactgctgaattacctgaaggcgttacgcaatttagtattcaaactgggaatgcacctgcaacgaagatgaagattaatggcaccgatattaaccttagtccaaataacgaagcaacgtttgtgcggacgattaatttcacagcaacattggctaaataaaggacattaaggagtcttcaacatgaatttaccaaataaattaacgatgtttcggattattttgattccgatttttactttgattttagtattggatgtgcctgcgacagccattatggtcgctgggacaagtattccagtcagtgcgattattgcaacagtgattttcattgtagcctctttgacggacttactagacggcaagattgcccgatcacaacatttggtgaccaacttcggtaagtttgctgatccattggctgataaattattagtgatgacagcatttatcttcttagtggcgctagatcaagcgccagcatgggtggttgcgattattatttggcgtgaattagccgttactggcctacgtttattattaagcgaaggtggcgaagtgatggccgcagctatgccaggtaagattaagacgacgacgcagatgttagcgattattctattgctactcaacaacgtcttctttaacaatatcggcattccaatggcacagatcatgttatacgtttgcttgttctttacagtttattcgggtaccgattatttcatcaagaacagaggcgtctttaaagactcattttctaaataaacttaaactggcggggaatcccacgccagtttttttaacccaaaaagcacgaaaaaaacgcggtgattcgggtatagtagagtagcttaaaaaatatatagaacgtttgttcgatttttacttgcttttatttcgtgaaatcggtaaactaagagagtactgaaaaggactcttttgaggagggcacttaattggctaaagatgaaagacaagcagccttagatgctgcattaaagaaaattgaaaagaattttggtaagggctcaatcatgcgaatgggtgaaaaggttgatacacaagtctcaactgtttcatctggttcccttgcattggatgaagcgctcggtgtaggtgggtatccacgtggccgaattgttgaaatttatggtcctgaaagttcaggtaaaacaaccgttgccttacatgctgttgccgaagtgcaaaagcaaggtgggactgctgcttatatcgatgctgaaaatgcaatggatcctaagtatgcaactgccctcggggttaatattgacgatttactcttgtcacaaccagatactggggaacaaggcttagaaatcgccgatgccttagtttcaagtggggctgttgatattttagttgtcgattcagtcgcagccttagtgcctcgtgctgaaatcgaaggcgaaatgggtgacgcgcatgttgggttacaagcccgcttgatgtcacaagccttacggaaattatcaggaacaatcaataaaacaaagacgattgcgttattcattaaccaaatccgtgaaaaagtcggcgtgatgttcgggaaccccgaagtcacacctggtggtcgcgcattgaaattctattcaaccgttcggcttgaagtccggcgtgctgaaaccatcaagaatgggaccgatatgatcgggaaccgtgcgcggattaaagtggttaagaataaggtggcaccaccatttaaagtggctgaagtcgacattatgtatggtcaagggatctcacaaacgggtgaactggtcgacatggcggtcgaaaaggacattattaataagagtgggtcatggtattcctatggggatgaacgcattggtcaaggacgtgagaacgcgaagaattacttggctgatcatccagaagttcaagatgaagtccggcttaaagttcgggaagcatatggtatttcggatgtcccagtagatgaaagcgatgaaacacaactcgacgtctttacggatgacgattcaaacgaataagaatcattaagctgaggcaaaagttattttgcttcagcttttttgattgcttaaccgaattattctgatggtcgatttgattgactgaactcgaaaacggttgcaatgccgatagtttaagttgacaggcggtttatgaaactataaaataactatgtgttgaaaaactaaacataataacatctttaaaaatttgcagtgaaagttgcaattcaaaatttttgatgatgcggaggtgaaacaatgaacttagcttttccattaatcctcgcagtcatcatgttaatcgttggtttactagttggttccgttctacaaaagaaggcgcacgaacgtgaaattgatggtgcaaataagactgccacaggaataatcgcagcagctgaaaaagaagccgcaacgcggaagaaagaaattcttttggaagcaagggatgaaaatcaccgctatcgttctgagattgaaaatgaattgaaagatcgacgcagtgaggtacaaaagcaagaaaaccgtttgattcaacgggaagaaacaatggatcgcaaagatgcaacgttggataaaaaagaacgttcattggagcaacgtgaaaatcgtttaacgaatcaagcacaagagctaactgaaaagcaggcagaagctgccactttagttgagcaacaaaaagcgaagttgcaagaaattgccgaattatcgcatgatgaagcgcaaaaaatcattttggatgaaacgaaacaagaccttgaacatgaacgggctgttttaatcaaagaaagtgaagaaacagctaaagaacaagctgatcggactgcgcgcacattagtcgctgaagctattcaacgcagtgcagcggatatggttgctgaaacaacagtaactgttgtgacgttaccaaatgatgatatgaagggccggattattggtcgtgaaggtcggaatatccggacattggaaacactgactgggattgacctgattatcgatgatacgccagaagcagttgtgcttagtgggtttgatccgattcgtcgcgaaattgcgcgcatgacattagagaagttaattcaagatggccggattcatccagctcggattgaagaaatggttgataagtcacgcaaggaaatggacgaacaaatcagacaaatcggtgaacaagcaatctttgatgttggtgtgcacacaatgcatcctgatttaatcaagattcttggtcgattacatttcagaacaagttacgggcaaaacgtcttgaatcattcaattgaagtggccaagttaacggggattttagccgctgaattgggtgaagatgtgacactcgctaaacgagctggcttgttacacgatatcggtaaggccctcgaccatgaagtcgatggctcccacgttgaaattggggttgaactagcaacgcgttataaggaaccggcaacggtgattaacgcaattggttcacaccatggtgatactgaagcaacatcgattatctcagtcttagtcgcagctgctgacgcgatttcagcggctcggccgggtgcacgttctgaatcacttgaaaactacattcaccgtcttgaaaaacttgaaagtattacgaatagttttaaaggtgttgatcatagttttgcgattcaagcgggtcgtgaagttcgggtgattgttaaaccagaacaagtcacagatgaccaagcaaccgtcttagcacgtgatgtgaagaatcaaattgagaaccaactcgagtatcctggccacattaaggtgactgtgattcgcgaaacaagaacggtcgaatacgcgaagtaatgcggattggcctaacattgaagcgggggacaaaaccaattttgttccccgctctttttttggttttaattaaaattgtggaggacattatcatgaaagaaggtgtgttattagttaatttggggaccccagataaaccagaagtcaaagaaattcgccattttttaaaacatttcttagctgatcagcgggtcgttgcgatgcccaaagcggtttggctccccattttatatggaccgattctgatggcgcggccgaaaaaagtgcgggcggcctaccgcaaaatctggacgacggctggtccccgttaaaagtgtacatgcaacagcaagttgctcaattacaagctgaattacccgattatcaagtttttgaggcgatgtcatatagtcaaccattcttaaccgatgtgcttagtgagattcaaacggcgggaatcgatgatttggcggtcgtgccaatgtattcgcaatattcaacgactacgacgatgtcgatttatgatgtagttgcgcagttttatttaaaacaatcaaacatgccaactttgcattttgtgaaggacttttatcaacgctcaggctatatcgacttgatggcaacggcgattgaacagaagctacagacgcaaacctatgacgaaattattttgtcataccatgggattccaaagtcgtacgtaacaaaaggggatccgtaccaagcacagtgtgaagcaactactgcgctattgcaggcgcgcttgcctaaacaaacttttcggaccacataccaatctaagtttggaccgaatgaatggctaacaccggcactagcactacgatgcagtcattagcccaagaaggcgttagaaaaattttggtcctaaccccgggctttgttgcggattgtttggaaactatcgaagagattgatgttgaaaatcgggactattttatggataatcaaggcgaacaatttgattacattcatccctttaatgctgatccacgatttacggccttattaacccagattgtgcgggacagataatcagggtgcttggcttttgcttaagaaatcaagtcattgttgtgtttaacgggtttgatttgtataataaagagaatgcaagagaaagtaggcaagttgaatgcaacccatgtttaaaattatagttggtctatttgcgacgatgctcgtatcggccgcaattaccccattagtgcgccgcctcgcgtttgttttaggcgcagttgataaaccaaatgcccgccgagtgaataaaaaggcgatgccggcaatgggtggtctggccatttttatcgcgtttacgtttgggaccttcgtattattacgcgggcaattccaaacacacgaacttttcagtatcttcttagcagaatgtatcatcatcatcactgggatgatcgatgatattaaggaattgaatccaaaggaaaagatgctcggtattttattagcagcattggtcatttatttcttagcgggcgtccgcatgaatattttgacaattccatttttaggcacctttgaactaggatggttaagcttcccaatcaccattttttggattctggcaattaccaacgccgttaatctgattgatgggttggatggcttagcaactggcgtttcgattatcgcactcttcacaatgggcgtcatcgcctatttcttcttatcaatcaccaatgtcagcgtctcaatcatgattttttgtttggtcgctgcattaatcggtttcttaccacataacttccatccagcgaagattttcttgggggataccggggccttattcattggttttatgattgcggtcttatcgctcaaaggtttaaaaaacgtgacgttcattacgttattgattccagttattattctcggtgtaccaattacggatacaatttacgcaatgttgcgccgaattttgaataaaaagcccatttcacaagcagataaacatcatttacaccatcgtttgatgcaacttggtttatcacatcgccaaacggttctcgtgatttatggactggcattggtcttctcgttgatttcattgctctacccactatcgacactctggggaagcttggcattgacggtagccgtcttaattggcttagaattatttgttgaatcaattgggttacttggtgacaatcgccgcccattattgatgcttttaaaacgattattaaaaccgaagaatgaagaaaaggattagccattggctaatccttttcttgcgttattggtagcgaatctggtgtaaatcctgtgcgctaatggggacttcgttgaattgttgagggccaaggtcgaattgtaattggccgttgaggcgttcggttaattgttgttgtaaatcactaactgctgtagtcgctaaccagacggtcatttgaatgttagtcgtatattggatgtcttcggcagtgaggtttaattggctaagtaaattttgcacagtgtcaaattgagcgtagtcaattgtaatctgacaagcggtttgttcgataccttggacaataccgaggtgttcaagtccggccgaagtggcgtgactgtatgctcgaataagaccaccagtaccaagtttgatgccaccaaaatagcgggtgacaacgacacacagattagtgagctgcatctggcgcagtacttctaacattggcacgccggctgtgccacttggctcgccatcgtcactttgtttttgaatattggccgttaaacctaattggtaggcgaaacaattatgattggccttcagatttgctttgcgaacttgtgcgatgaacgcttgtgctgcggtttcgtctgtgacacgcgcaacatgacagatgaagcgtgactttttgatttcgagttcaaattcgccgtctttttgaacggtaaaataactttgcataccggactccttgaaaaaataagctggatttaacggaactaaggatggaaggtgaaatgatggcaaaacaacttgcttatggtcgtcagtggagtgccacccaattgagtaccgttatgaataattatagtttaccacagattaaacagcgactagcgtttcaaatagttaatcagcgtctggtatgtcaacggtgtggacaagtggtgaaagagcaagctcgcttacctgatggtcggtattattgtgctgcttgcttgacctttgggcggttagtggaaggggatcagttggtttacgtgcctgaatgcaatctgtttgagtcgatcgtagaaccgctaacttggtcggggacactaaccccttttcaagcacaagccgcaaagcagattgttgcggtcattaccaagcaacaacgccatgtcttaactgcagtgaccggtgctggtaaaactgagatgttatttcaaggcattgcgacggctttagctaatgggcagcgtgtgtgtgttgctgcgccgcgggtggcggtttgtttagaactctatccgcgcttgcaagcagcgtttgctaacacaccaatcatgctgatgcatggggaacagactgcgccttaccggtatacgccgttagttgtttgtacaacccatcagttatttaagttttatcaggcatttgacactgtcattgtcgatgaggttgatgcgttcccatttgtcaataatccccagcttgagatggctgttaaacaggcgtgtaagccatgctgtgcattgatctatctgacggcgacaccaactgtaaagttgcgccatgcgattaatacaggggatttaacgggtagtgagctaccaattcgctttcatggtcacttattacctgaaccgcattgctatcccttgtttacgtggcggcgttcagttaaacggcatcagttaccatccgtgacgcgcaacttactcaggaagtgtcttcaagaacaacgcttattattatttgtgccacaggtaagggatttagaggcggttcagcagagcgttgttcgggcattgccacacattacagtgaacacggtacatgctggcgatcctaatcaattagacaagatagcggcctttagagcaggatgcggggacgtgctgattacgacgacagttctagaacgaggcgtaacgtttaaaaatattgcagtgtttgttcttggtgcagaacacgtggtcttcactgaatcagtgcttgtacagattgctggccgagccggacgacagcaagagcatgctgccaatccggtttattttttctacgcggattacacggtcgctattcagcgtgcgtgtcaacaaattaaacgacaaaatcgaaaaggacggcgattacaatccactgtttaatgtgtgcggcagttatccttgaacaaccctccattgcattgatttgttcattgcgaccagtctatccggcgatgatctgttcacgttgcatggcacagtttgaacggattgggccgcagtgttgttcgggatgtggtcggcaaatgacaacccagggggtgtgtccggattgccagagatggcagcaactgtatccaggcgaacaatttactaatcgagcgttgttaacatacaacgaaccaatgcaacagtattttcaacgctataaggggcagggggattatcgattacgtcacgtatttcaacggctgattcgagaaaattttcctgtgcaacggcaaacggcgtatatcccagtcccgactgatccaacacatttgcaaagccgcggattcaatccggtggttggcttatacgaggactgttttccactgaccccattgttgcagaagctaccaactgaaaaaggacaagcacaaaaaaatcgtgcagagcgcttagcaacgccgcaattttttaaatgcgcgcagaacgtgctgttgggttccaaggtgcagcagttaattttgttggatgatatttataccactgggcgcacgttatggcatgctcagcagtgtctccgcaagcgataccaaacgctgccaattcacgcaattactttagtccactaggaccatattatttgtgtgttacgcgcaaattatatataatgaagtcagtaacaaagcctcgggaaagaattgagttccgagcgacaagtgcccacagggggtatttgtgaaaggggagaattcatatgctaagttttaatgttcgtggtgaaaatattgaggtaactgacgcaattcggagttatgttgaaaagaaaatcagcaaactcgaaaaatatttcgatgattcagcgaccgcaactgcacacgttaatttaaaagtgtactccgataaaaccgctaaggtggaagtcaccattccattaccataccttgtattaagagcagaagaaacatcgcctgatatgtatggtagcgtcgacctagttactgataaattagaaagacaaattcgtaaatttaaaacaaagattaaccgtaaatcacgtgaacgcgggattaaaggtatggaattaacggtgccagaagcagaagcattaccagaagaatcaatgcaagtcgttcgaacaaaacgcgtttcattgaaaccaatggatagtgaagaagcaatcttacaaatgaatatgctaggccatgagttcttcatcttcgaagattcagaaacaaacggtacaagcattgtttataaacgtcaagatggtcgttacggtttgattgaaactgatgaataagtgaacgttaagttagggctgggacaacgatgagttgcgctcagccctttttttgtagccatatagataatggggttaaatttttactgaattggctggattgtttactgtgacagggttttatttgattgtaataaatggtaaaatgaattgttagtaatcatattgactatataagaaatcgctatttaagaactcaaacgtatttctagaggagaattgacgcacatggcaaactttctaaaaacatgggtagaaagcgataaacgtgaagtagcgcgaatgggcaaaattgccgatcaagttcaaagctatgaagatgaatatagtaatttatctgatgaagcgttgcaagctaagaccccagaattcaaaacaagattagcaaatggtgaaacattagacgatattttaccagaagcttttgcggttgcgcgtgaaggtgctaaacgtgttttagggttattcccgttccgtgtacaaattattggtgggattacgctacacgaaggtaacatcgctgaaatgaaaactggtgaagggaaaaccttaacggctaccatgcctgtttatttaaatgcattggctggtaaaggcgttcacgttgttaccgtcaacgaatacctttcaagtcgtgatgcaacggaaatgggtgaattatataactggctcggtctttctgttgggttaaacttaaatgctaagacaccagaagaaaaacgcgacgcatacaactcagatatcacttattcaacgaatagtgaacttgggtttgattacttgcgcgataacatggtggtttacaaagaagaaatggttcaacgaccattgaactttgccattgtcgatgaagtggattcaattttaattgatgaagcgcggacaccattgattatttctggtcaagctgaaaagtcaacagcactttatatccgtgctgatcgttttgttaaaactttaaaagaagaaactgactataagattgattggccaacaaagaccatcagtctaacagaatcagggattgaaaaagctgaggctaacttcggcttggacaatttatatgacactgaaaatacagccttgacgcatcatttggacgaatcattacgggccaactatatcatgttaaaagacattgattatgtggttcaagaaggcgaagtcctaattgttgaccaatttacaggtcgtgtgatggatggtcgtcgttattcagatggattacatcaagcgattgaagccaaagaaggcgttgaaatccaagatgaaaccaaaacaatggcgaatatcacataccaaaattattttagaatgtacaacaagttatcagggatgactgggacggcgaagaccgaagaagaagaattccgcgaaatttacaacatggaagttatctcaattccaactaaccgcccaattgcccgaatcgataaaccagatgtgctttatccaactttggaaagtaaatttaaggcggttattgaagatatcaaggaacgttatactaagggccaaccagtattggttgggaccgttgcggttgaatcttcagaattactatcgcgattactagatgaaaataacgtgccacacgctgttttgaatgctaagaatcactttaaagaagctgaaattatcatgaatgctggtcaacgtggtgcggtcactatcgctactaatatggctggtcgtgggactgatattaaattaggacctggtgtgacggatttaggcggtttggctgttattgggactgaacgtcatgaatcacgccggattgataaccaacttcgaggccgtgctggtcgtcaaggggatcctggtgtcacacaattctacatgtcattggaagatgacttgatgaaacgtttcggttcagaacggattaaagccttcctagaccggatgaagatttcagatgacgatgcggtgatccaaagtaagatgattacgcgtcaagttgaagccgcacaaaaacgggttgaagggaataactacgatacacgtaaacaaacccttcaatacgatgatgtgatgcgtgaacaacgtgaagtcatctataaacaacggatgcaggtcatcatggcggaagataatttgaaagaagttatcatgccaatgatttcaagaaccgttaaacggattgtgcaattgcatacacaaggtgaaatggggagctgggaattagaagcaatccacgcatttgccacaacttcaatggtcagtgaagaagaattaccaattgaaaaattacaaggtaagactgctgaagaaatcgaatcattattgatgacctttgcagaaaagaattacgcaacaaaacaaaaacaattagcagatgcagatcaaatgctcgaattcgaaaaagtcgttatcctccgtgtggtagatgaacgctggaccgatcatatcgatgcaatggatcaattacgcaactcaatcggattacggggctacggtcaaatgaatccattggttgaatatcaagaagaaggttaccggatgtttgaagaaatgatcagcgacatcgattacgatacaacccggctcttcatgaaggcggaaatccgtcaaaatattcgacgctaacgcgtagaaaatggctgaggtagttaacttagccattttttaatgggaaaaaatagtggagggactaaaatatggaattaagtgaagcaaaacatcttttagaagcaattgaagctaaaataacgcaatttagggggtcactttgacttagatggcctgcaagaaagcatcgcgcaaaatgaagcgcaaatggcggatcccgatttctggtcggatcaaaaagcagcccaacagttaattgatcaaaataacgccataaaggaaaaatacgacgcttttatgcaacttcaagcgcaatcagaagagctacaagtgacattagagctattacaagaagaacccgatgctgaactccagacgagttttgaagctgatttgacggctgttcaagttcagatgcaacaatatgaactcggacaattactatcgggcgactacgatagcaataacgcgattgttgaattgcatcctggtgctggtggtacggaatctcaggattggggttcaatgcttttgcggatgtacttacgctgggcagatgcacacggctttaccgttgaaacagaagattaccaggccggtgaagaagctgggattaagagtgtgaccttgatgattaaagggcacaacgcgtatggcatgttacgttctgaaaaaggggtccatcggcttgtacgaatttcaccgtttgattcagctgggcgccgccacacctcgttttgttcagtcgatgtgatgccggaattggatgattcgattgatatcgaagtccgcaccgaagacttacgaattgacgtcttccgttcaagcggggctggtgggcaacatatcaataaaacatcatcagccgtgcggttaacgcatttaccaactgggattgttgtttcatcacaggcgcaacggtcgcaattgcaaaaccgcgaaactgcgatgaatatgttgaaggctaaattgtatcaaaaagaacaagaagaacaggcgaaaaaagcggctgctattaagggcgaacagcttgaaattggctggggctcacagattcgctcatacgtattccatccgtacacgatggttaaagaccaccggaccgactacgaaaccggaaacgggcaagcagtcatggatggcgatttggatccatttatgtatgcctatctgcaatggcagttgagtcagaagaatcccgactagctgcaaagaaattgaaatataaatgtaatcaaattgtgattatttgaataaatagcatgctataatataaaagattgcggttttcattgacaataaataatgataacgacaaaaaaaggagtgtccccaattgattcgaatgacaaatgtgtcaaaaaagtatccaaatggcgtgacagcaattaaggatctttcgctaacgattgaacccggcgaatttgcttatattgttggtcccagtggtgctggtaaatcaacattcattaagatgttgtaccatcaattaaaagcaacgagtggtgaaatcgaagtcgctggttttgatttaatcggtatgaaggatcacgatgtcccatacttacgccgtaagatgggtgttgttttccaagatttcaagttattaccacgtttaacggtgtttgaaaacgtggcatacgccatggaagtgatcgaggcagaacctcaagcaatcaaagatcgtgtattagaagtgctcgaactagttggcttgaagggtgaaattcgtcgctttccaaatgaactttctggtggggaacaacaacgggtcgcggttgcacgtgcgattgtgaaccggccagatgtgttgattgccgatgaaccaacggggaatctagatcctgaaacgtcagatggtattatggatattttagaagcaattaatgaacgtgggacgattgtcttaatggcaacccataacaaacaaatggtgaacgaacggacccatcgcgtcttagcgattgaagacggtcgcttagttcgtgatgaaaaagaaggtgactacggctatgaagattagaacattgaagcgtcatatcaacgatagttttaagagtttaaaacgaaatggctggatgtcaatcgcagctgttagtgcagttaccgtaacgttgttattagtcgggattttctttgcgatgatcttcaactttaacaagatttcacaagatattgaaaatgatgtgcacgtgcgggttatgattgaacggggcacaacaagtaaacaaaaagatcagctacaaaagaaacttgaaaaaatggcgtctgttaaagaagtgacgtattcaagtcgtaaaaaggaattaaacaaggttgtcggcagttacggtcaatcatttaagatgtttaccggagacgataatccgttgtacgatgtttacacagtaagtacgacaaaaccaagtcaaacgattaaagtcgctaaacaagcgaaaaaattgaaatacgtttatgatgccacttatggtgggaacaacgctaagaagttgttcaaggtaatgagtagcgtccgtaaatggggcgttggttttactttattattgctctttgtggcagtgttcttgatttccaatacaattcggattacgattttatcgcggcgcgacgaaatcggaattatgcgtttagttggggcaactaactcgtatattcgctggccattcctttttgaaggggcttgggttggattacttggggtaattattcccattattgtaatcgacttaggttatggttgggtttaccgtcatatggcactcagcatggcttcagccggttattcaatgttgaaaccaggaattttcttattccaacttgatttaacaatggctgtgattgggattgtgattggggcattaggttctgtcatctcaatgcgtcgtttccttaaaatttaaactaaattagtgaaagagtggcgaacattaaattgttcgtcactcttttttttgaaccctaggcagttaagggggcaaaatgctatactgattgggataactgcgaaattcggcagctggaaatcgagcgtgtgtcgttggaaacacgcacggtatttaaatatagacgctgggggtttgttgaattgacgatgatcattgatattttgcgaccattactaacggcaccacttttatggttagcgattgtgtatgctggctggttagcgcatagacgaattagcttggaacggaagacctttagaattgcgattaatccacgatggatagaagtgggccattttgtgggccatgggctactcgcagggctagccttaagttgctgtaccttagtgttaggggcgatggttaatatgcaatggtggctggtctatcaactaatcgctattttgagtttgctagtggctgctagatggcaaaacgtatcggcaacctttttaatcagtgctttggtctacgctggtgcaacattcatatggccccaatatcagatggaaggtcaagcaagtcttttggctgaattattggtgattattgggttagtgaccgtcatcaatagtgttttacaacgttgggatgccgaggcaactgtgacaccgcgtgtgatgactagcaagcgagggcggttgacggccttctttatgagtcgacaaatttatattgcgccggtctttttcttagtgccaggggcaattgatatgccaagtttgggtttttggccggtcttaaatatcgggcatcaatcatatagcttggtaatcttgccattgttattgggatttagtttgaaagcagtcaaaggcttaatgaaatcagttgttactaaaaatgccaatagctatttgatctttggcttgttgttagttgggtttgggttaattgccgttgcatttccgaactggattattggcatgttaacagttgcgctagtactaagctgtgcattacaatggcggttgagtagacgcagtgcccatgaacggcagttgcactttacgaaaccctacgatggcgtctttatcttagggattttacgcgaaacgccggctgctaaaatggggttggtcgttggcgatacaattgttgaatgtaatggcgaggctgtctcaaataacgataatttttatcgggcgattcaaagtcagccaacgtattgccatttaaaggttcaagatttaaacggtgagttccggatggctgaaggcgcaatttttgctgatgcaccacatgagttaggcgttgtattattcccagagaattaagtaaataaagggtggcatgaatgaagacaattttagtggtagacgatgaaccagcaatcttgacattattacgctataacctggaacaagaacattttaaagtgatgacggcaactgacggtgcacaagcgctgacgatggctttacagcagtcgtttgattttattattttagatttaatgttgcctaagctagacggaattaccgttaccaagaagattcgggaggcaaagttaaaaacgccgattatgattctaacggctaaggatagcgaaaccgataaaattgtcggcctcgaagtgggggcagacgactatgtcactaaaccatttagtccacgcgaaattatcgcgcggattcgggcaattgaacggcggacggcacagcctgtagcagtcgttgaaacgcaccctagtgatattttacaagtaggggacttaatggtcgatgaaggcgaagttgtggctaaaaagggcactcagaagctccatttaacgcctaaggagttcgaactccttgtttactttatgcatcggattaacaaggttcaaagccgtgagaaactcttaaatgcggtgtggggctttgattatccagccgaaacgcgaatggttgatattcaagtcagtcatttacgggaaaaaatcgaaacagatccgcgtcatccagtttacttaaaaacggtgcgtggtttcggttatcaattggaggaccccaaccatgaccaaacatgatcaatttagattttatcagctagccactattttagtggctgtttacataggttttattgtgcttgtcaatttggtgattgcccaacaacaagacgcgatgttaaaggaacggggcgccgactatgcgctaatcatcaaacaaccacagtttgatcggcaaaagtggttacgccaaaacggcttacaagttttgacgccaaaatcgccgaataaaacaaagttgcaaaaagcagtgacggatattgtcaatcggaatcattctgccgccaattttagtacgcggcaaacagttaataagcaaccgtatttgttttacgcacaccaagcagatcggcccaactttgtcttagtagtgcctcagcaacagttctggcatacgtggccgaagattgctttatcggtcacgattgtctatttaatcggtagctggatttttctataccgtttctggcggcaacgccatcatttctttgaccacttgaaaattttagtcgctaatattcatcatattcggcatgaagaagtgcccgaaccgattatttttcaaaaagatgcgtcattatatatcctcgcgcaagaaattaataaattaaatggtgatatgcggcatatgcggcagaagattgccatgcaacagggcagttttgaccgcctaattgaccatttaccggtcggcgtcatggtgattaacgaaaatcgtgaagtcgttttgcacaatgaagcaatggatcggttattggagacgacgattgttactgagaaacacccctatattgatgatatcaagacgtatgaattaacacggatgattgagcacacttttaggtaccgaaagagtcatcaccaagaaattcagttgattcaaaatcaagaacggtttgtggatgcgaatgttgtccaactcaatacggttaaatcgaaattccaagcattagtcattttatatgatttaaccgatgtccggcgcgttgagcagatgcagttggattttgtcagcaatgtgagtcatgaattgaagacgccggtgacggctattacaggctttgctgagacgttgttagctggtgcggcggaagatcctgccacgcaaaagcaattcttacaaatcatctatgacgaaagtacgcgattaactgcgctgattcaagatattttggcgctttcgcatctagatcgtaaggaccaatcgcaagagcaacttgtgaatgtacgtgaattggtgcaggctaatctcgaactgatgcaacaaaaggcacaacaaaagcagttacacgtctccgttgatattccaacggatttagcgattagaattcagaaaatgaagtttaatcaaatcttgaaaaacctaatcgctaacgccatcacgtataataaacaaaacggctcgttggtgattgccgtgcaacttgaaaaagatcaaattggtatccgcgttgtcgataccggtttgggcattccaagtgacctacaagaaagaatttttgaacgattctatcgggttgatcaagcgcgcgcgacccataagagcgggaccggccttggactagcaattgctagcgagattaccgccagtttagaggggcagttgaccgtaaagagtcaattaggtgtcggtagtgaattcattttgaagctaccaaacgcttgatttacacaaaatttacatttgataggcttagtttttacaaaccttttttataatggaacttacgaggtttaaatggaattcgtggaggattaacatgcgcaaacgtaatgttattggcttattagtcacattcagtttattactattggctggttgccagtctaaacaaaatggtcagtccgtaacggcggtcggctcatcagcccttcagccgctgattgaagcgttagctgaacaatacagtgctgatcacagcggtcagttcattaacgtccaggggggcggttctgggactggcttgagtcagattcaatctggcgctgtacagatggggaattctgatttatttgctgaagaaaaggctggcattaaagcggacaagctggtcgatcatcgcgtggctgttgtcggcattaccccagtcattaataagcaattagggattaaaaacttaacattgacgcaactcgcgaagatttttagtggcgaaattgataactggcaagacgttggtggaccagatcagccggttgttttagtaaaccgagcccaaggtagtgggacgcggacgacgtttgaacaatgggtgatgaagtcgcgcaagactaaacccgctcaagaacaagattcaacggggatggtgcgatcaattgtagcgaacacgccaggggccatcagttatcttgctttttcatacgtagatgattcgattgcaatggttaaattaaacggcattgcaccaaccgatgaaaacgtgatgactaatgcatggccaatctggtcatatgaacatgtttacaccaaggggcaaccaactgggttaacaaaacgtttcttggcgtatgtcttatcagatgaggttcaacataaacaagtcggcaagatgggctatattccagttgctaagatgacggttgaacggtcggttgatggcacaattacaaaggttaagtagggggccaattatggatccaattaaagcaagtttacttaagaaatcacgcgcagccaaaagtgaaacacggggcaaattaatcagtttattctgtattagtttaatcgtgttcatcgtgctcgccattttctacttcgtcgcttcaaaagggttagcgaccttctttaaagataaaatcaatctaggccgctttttaacgcagtctaattggaatccaagtttgaaagatagtcatggtcgaccagaagtgggcgccttaccaatgattatggggtcatttggagtgactttcttagcggctttattagcaacaccgtttgcaattggcgctgggatttttatgactgaaatctcacctaagcggggtgaaaaagtattgcaaccagtgatggaattgctcgttgggattccatcagttgtttacgggtttatcggattatccgtgattgtaccagctgtccgtcatttgtttggtggcagtggctttgggattcttgccgggacttgtgttttgttcgtcatgattctaccaactgtgacatcgatgacagtcgatgcactcaagagtgtgccacggcattatcgcgaagcctcactcgctttaggtgcaacgcgttggcaaacaacatggaaagtcgttttaaaagcagccacaccagggattttaaccggggttgttttcgggatggcccgggcgtttggtgaagcattggccgtccaaatggtcatcgggaacgctgcgttattaccacataacttaattaccccagcctcaacgttaacgagtgtgttaacgatgggcattgggaatacggtcatgggttcattagccaataatgcactttggtcattggcgttactcttattattgatgtcactactatttaacttattagttcgtttaattggtcggaagggagcaatgggtcgctaatggatgcaaaaaaatgggataaagttgccaccggtgtgctaaccctcatcgctggtttgatcgtattattattagcaagtttgctcggctatatcttggtgcgcggattaccacacgtgacgtggcagtttttaacgaaacctgcgcaaacctttactaaaggtggcgggattggcgtccaactgtttaattcattctatctattaattttggcgatggtgatttcagtaccgttatcaattggtgccggcatctatctcgcagaatatgcgccgaagaactgggtgacgaatgttgttcggaccgcgattgaagtgttaagttccttaccatccgtcgtggtcgggttattcggtttcttggtctttgttatccagtttaagctaggcttttcaatcttagcgggtgctttagccttgaccgttttcaatttaccgttgttaacgcggaatgtggaagatgctttaaaatcaattcacttcacacaacgtgaagcaggtcttgcacttggtttatcgcgttatgaaacggttaagcatgtcgtgattccagaagcgttacccaacattattaccgggatgattttaggcgctggccgggtctttggtgaagcggctgccttgatttatacagctggacaaagtgccccatcacttgattttaccaactggaacccaatgtacatcgcgagtccgttgaatccattgcgacctgcggaaacattagcggtgcacatttggaagattaactcggaagggattatgccggatgcgactgcggtttctgctggcgcatctgccgtcttaatcatcgccgttttactatttaactggttagcacgggtcatcggcaagcgtgtctaccgtaaaatgacagcagcataggagaaaataatggcagattacgatttaacaaaaacgcacatcaaacatttagatgaaccaaaacatgaaattgccttatcaactgaagatttaaacgtctattacggcgacaaacgcgcgatgcacgatgcatcattgcaatttgaacgctatcgaattaccgcgttaatcggcgcttctggttcaggaaagtcaacctatcttcggagtttaaaccggatgaatgacaatattgctaatacacgtgtgaccggtaagattatgtaccggggcttgaacatcaatagcgatgacgttgatgtgtataagatgcgggaacatatcggcatggtgttccaacggcctaatccatttgccaaatcaatctatgacaacatcacttttgccttgaaacaacatggacaaaaagacaaaaagtatctggatgaagtggttgaaacgtcactaaaacaagctgctttgtgggatcaagtcaaagattcattaggaaagagcgcattggcactatctggtgggcaacaacaacggttatgtattgcccgggcaattgcgatgaaacccgatattttattattggacgaaccggcttcagctcttgatccaatttcaacgaacacggttgaagaaacattgattcgcttaaaagaagaatttacaatcatcattgtgacgcataacatgcaacaagcagcacgaatcagtgattacacggcctttttccattcagggcacgcacttgaattcgacgaaacacgtaaaatgtttacccggccgaagattaaagcggccgaagattatgtttctggtcactttggctaggacgcaaggaggtttgccccgtggcaaataagattattgaatcctcagatgtgcatctattctatggtaagaatgaggccttaaaagggattaatatggattttgttgaaaatgaaattacggcgctcatcgggccatctggttgtgggaaatcaacctacttgcgctgcttgaatcgaatgaatgatttaatcgactcggcgaaggtgaccggtaaattcttattgaatggccaagatatttatgcgcctgagatggataccgttaagttacggaaagaagttggcatggtgttccaacaaccgaacccattcccattttcaatctatgacaatgttgtttacggcttacgtttatccggtgttaaagatcatcgcgtcttagatgaagccgttgaaagtagtttgaaacaagcggccgtttgggacgacgtcaaagataagttacacgaaagtgctttatcactttctggtggtcaacaacagcgggtttgtatcgctcgggtgttagctgtgaaaccgaaagtgatcttaatggatgaaccgacttctgcgctagaccctatttcgagtgctaaaattgaaaatatgttgctagaattgcgccaacagtataccattataatggtgacgcataatatgcatcaggcttctcgtatttcggataagacagcattctttttacaaggtgaattgattgaatacgcaccaacgaagaagattttcttaaacccaaccgaaaaagaaacggaagattacatcagtggccgttttggctaagaaagaagggaaaccacaatgagacgactttttgaagatgagttaaatgatttacacgttcgcttctccgaaatggggatgatggtcaacgaagccatctataaatctgttaaagccttcattaatcacgataagcaactcgcacgcgaggtgattgctgacgatcatcagattaatgaacgggaaacggatttggaacgtaagagttttgagttaatcgcacttcaacaaccggtctcaactgaccttcgcgtgattgtcacaatcatgaaggctagttcagatttagaacggatgggtgaccacgccgtttcaatcgcgaaatcaacgattcgggtcaagggtaatacccgtgtccctgatatcgaaaaagatattgcggatatggcagacaaagttaaacaaatggttgaagaggtattggacgcttacgtcaaagaagatcgtaagaaggccatcaaaattgccgatgaagatgttgcaatcaatgcttattcagacaatatttatgacgactgtatcaaagaaatgcaacgtgattcagaaaccgtcgttgggagcatggactacatgttagttgcaagctacctcgaacggattggcgattacgtgacaaacatctgtgaatggattgtctacctcagaaccggtaaggtagtggaattaaactccaatgcacaagaagatgaattctaaacaattcaattaaaaattttaaaaagcgatgacaaggtcgacttgctcgtcgcttttttagtgggagaatcataatgcaaaaacaaatatacttagctggcggttggtttacacctaaacaggcctcattagtggaacgcgcacacgcggctttaaaacaaaacccaacgattggttatattcatagtccacaggagcatcaatacaagggtgtgacagaagatcatgatccagaaggcatgttcgggggttacgaatgggccaaccaaacgtatcaaaacgacatcacagcaatggatttagcagacatggcagttgtgttatgggatatgcaagacgaagatacgggaacggcgtttgaagtcggctacttgaatgcctgtcataaaccaatcgtctttgtttgtgaagatgatttacaagccaatcccatcaacctaatgttggctaaagggattacccaatgtctaaccagtgtggatgaattagcaacctttgatttccaatttgtcgccggcgaaccttacacaggacaaatcgtttaagcaaaaaagcgcaggacaaaaataattttgtcctgcgctttttttgttctcactcttgatacctaaataaaaatcaacctttggacctatgacaatcgactgtaaaatcggcataatagagtcatagtcaagtgaaacagtacaacgaatgatcaatggaggtcaaaacaatgaatgaacgtcaacgaattttagacttagtgaaccaaggtattttaacttcagaagaagcattagtcttattagaaaatttagccaaaaatgaccaagatgtaaaatcaaatccaactgaaacagcaacggagcaaactgaacaaccaaccgctgataaaagcgcaattgaagaaaaggcacacgaattaaccgttaacctttccggcgttaaccggcagttgcaagatttgaagcaagcaatgcacgctgatcaagaacaagtcactgtccttgatacgatggaagatttagatagtttaagcagtgaaaaagcaaccgaacggcaaacactcaaggctggcttattacaaaagcaagctgaagtcgacgagttggaagccaaacgcgaagcactgacggatgaactcaaccaaatcgaaaaagaacgccgccaaatgaccaaaaatcaatggtcagaaaaattaggcttatcagatgactggaaagaaaatgccagtgaaacatttgatgaattgagcgataagttaggcgaagctagcacacactttggtaagttcgtgaagaatactgccaaaacagtcatggataatgtggattggaaagaagtaaactttaaggtgcctggtttggcaactgaaaagttcagccatgaattcgtttattctgacgtaacaccagaaatgattaacgtcaaagtggctaacggtagtgtacatttccaaatctgggatcgtccagaagtcaaagtcgcagcgcaagtgaagttatatggtaaaatggcagaagcaacaccattggctgcttttgaagcgcgcagtacaattgatgtgactgatgccgacttggtcttccaagtgccgaataaacggattcaagcggacttaacgttctacttaccagccaataactacttacaaacgaatgtgaagttattgaacggggatgttgaattagatggctttaccggccgggatatttacttgaagacgactaacggtgaattaacgttaatcagcaccaacgctgcaatggtggaagctgaaaacgtcaacggtggcattacctttgatcaaggccgttacgatgatttactcgcaacaaccgtcaacggtaacctattgattcaagcgcaagttttaaatgcgagtgtttcaacggtcaacggggatatcaagaacactttgacgacaactgatttacaacatctaaaagcaaaatctgtgaatggcacaatcaagacagctttaccacaaactttggcaatgactgttgatgcccgcacgcgttttgggatgattaaaaatcggcttgcaaacacccaaaccatcgaacaacggcaaagtacggggaatcaaatgttacaacttggccgtaacgacaatgaacaggcagctcgtttaacattaagcacgacaactggtaatattttattgaaagacaacgataactaaaaaattaaggaatggtgggttttaacaatggggaaaagactttataaatcaagagataacaaaatgatttctggtgtaatgggcgggattgctgagtattttaatattgatgcgacattagttcgaattctatatgttgtattctcaatgttttcagcagcgttccctgggattgtggtctacatcatcttagtgatggtgattccagaacggccacgtcagagtaaacatgattctgaaagtgaatggagtgagttttaatgccttttttaatgattttattagtcattatcgccattatggcggcagttggcgtgtttagtctcgtgattggctcgctactgttattattaaaatttgcgctaccactgattgtgattgggttaattgtcagcttcatctatcgggcaattgttggtccaagtagacgtcctcggcatgcagactggcgccatgactaccaagactattcttatcaagaaacagcacatcaaggtagccgtcaacgcaaggaagcccgggatgtcaaagtagacgatgacgactggagtgatttctaatgcgttattggacacgcgtaattgttgatacgctgttattcatcgcgatttctggtctattaccaaacttgttttatgttgaaaacatttggatcgcgttagtcgccagcattgtgttatcgattttaaacatctttattaaaccattgttgagcttactctcatttccaattacgtttttaacattcggtttgtttagtgtcgtgattaacgggattatgttagaattgaccgctgttttcgtcggcgcccactttagctttacaagttttggagcagccgtgatcgtggcaatcattttatcaattgccaatacgattattacaaatcaatttgtgagagagcgttattaaaaagttagcgggactgacgtcaattaagattgacattgggcccgtttttttgtttagataagaaaacgcctacattaaagttgaaaaatcaccttaaaagcaatatgatagaggatataagtgaaaatgaaggacgggtaactcatggctgatagtgtttcaattcaaaaactagtcaccgatttaaaattacaagtttatgccggtgaagcatatttaaaaaataaagcagtgacggtgagtgatatttcccgtccaggactcgaattaacgggctactttaattactacccttacgagcgggtgcaattatttggacggacggaagtttcatttacgcaaaatatgacaccagaagaacggttaatgattatgcgtcggatggcttctgaagatacgccctgtttcttggtctcgcgccaattagaaccgccaatggaaatgcttaaagcagctgaagaagcggggattcccgtgttggggtcgaatttatcgacaacgcgtttgtcgagtttagtaaccgattatttggaagggaagctagctgaacggcgctcaatgcatggtgtgttagtcgatatttacggtttaggtgttttaattaccggcgattcaggtgttgggaagagcgaaacggcattggaattagtcaaacgggggcatcggttgattgctgatgatcgggtcgacgtttatcaacaagatgaacaaactgtggtcggtgaagcacctgcaattttgcgtcacttacttgaaattcgaggcatcgggattatcgatgtgatgaacctctttggtgctggtgcggtgcgggctgaaacgtcaatttcgttaattgtccacttgcaaaattggtcacaggataagaaatacgatcgcttaggttcagataccgaagaacaaatgattttcgacgtccctgtaccgaagattaccgtgcccgttaaagtcgggcggaacttggccatcattattgaagtggcggcaatgaacttccgggctaaatcaatgggctatgatgcaacgaagaccttcgaagccaatctaggcaagttaattgaagccaattcagatgaagaagaatagttaaaagtcagaaaagttcgttaaatatggtaggtctaatgactagtttgagctatactgttagaaagacagtatgcaaactagtcttttttagagtgcgcagtaagccgggtatatcctgaggtttaacacagaatggcgaaggattgcgtcagtaatcgtttgacattcaggggtaaccggaaggatatggcttacggagcacgtttcggataagagtgcattcaagcttgtccaacttttgcgtattagcacagtgaagcgataagcgacgcagtcgattgtttgcttcacgacgctaagcgcagaaagttagcttgaaaagtacgttttgatgaaagcacatttacaaaaggagcgaataatttgaatctactattaggcgcattaaatccgattgcattacgattgggcgcattggagatccactggtatggtgtgattatcgcaactggggtcgttttagccgttggattggcattacaggaagctaaacggcgcaatgtcagtgaagatgatattttaaatttaattttatgggcattaccatttgccttaattggggcccgactgtattacgtcgtttttgaatggtcgtattaccaagccaatcccggcgaaattattcagatttggcacggcgggatcgcgatttacggtggactgattgcagctgccattgtgttcattatctattgtcggcgtcatgcactatcgccttggttagtgttggatattgcggcaccaaccgtgatgatcgcacaagcaatcggacgttggggcaactttatgaaccaagaagcctatggggcgccaacaacattgcactttctccaatcgttacacttacctgattgggtgatccaacagatgttaattgatggtgcgtatcgtcagccgacattcttatatgaatcagcatggaatgtattagggtttattagcatcatgagcattcgccatcgaactggttggtttaaacaaggcgaaatcttatttagctatttaatttggtattcgtttggccggttcttcattgaaggcatgcggactgatagtttattcatcggtccattgcgggtatcgcagattgtctcactcgtcttattctttggtgcaattggtctttggatttggcggcgtaagcacagtcagttaccggattatttaaccggcaatcaagcaaaagaacagaaatagggatttgtttaaaaggagaattatcagatgacagtaaaaattgcagttttaggggccggttcatgggggaccatcttagcaaacttattagtggaaaatggccaccaagttgagttgtggggcaatgatcctaaaaaagtcgctgaaataaatgaacagcataccaatacacattatttaccagattttaaaattgatccccagttacacgcaacgattgatcttaacgttgcacttgaccaagttgatgttgtcttgtttgtaattccaacacaagcgattcgtgcggtggcggaacagattgttcctgtgatgattgcgaaaaaagtgaaacccgtgattgtgacggcttcaaaagggcttgaacaaggcacgcacaaacggatttcagaagtcttgacagaagccattccagaaaccaaccgcaatgggattgttgttttatcgggtcctagtcatgctgaagatgtcgcacaaaaagatattactaccttaactgccgcatcaagtgacttgattcaagcccaatggatccaagagattttcatgaatgattatttccgcttatataccaaccctgatgtggttggtgttgagatgggagctgctttgaaaaacgtcattgcacttggcgcgggtgctttaaacgggcttggttatggagataatacgaaggccgccttgatgacgcgtggcttagctgaaatttcccgcttaggcgttgccatgggggctaacccattaacctttatcggattatccggtgttggggatttaatcgtgactgggaccagtgttcactcaagaaactggcgtgcgggaaatgcacttggtaaaggtcaaaaattagctgatgtgctagccaatatggggatggtcgtcgaaggggtcgcaacatgtaaagcagcctatgaattggctcaacaacgttctgttgatatgccaatcacacgggccatctataatgtattgtatgaagattgtgatattaagactgaaattgcgtatttaatgcggcgttcaggtaaacctgaaatcgattttgatgaagtctaaaactttttaacgaataaagcggcatcattttgaatgggtatcgcacccatcatcagagtgtgttatgatgattagcgttgagaaaaaggctaaaggagaaccgattactttatgggcgatttggtatctgtaagaccaacttgtgagttttattttgacagagggatgcaggcgtttgaacgatttcagtacacgcgcgcattaacgtgtttacaacgggcaaagtcgctggctaagaccaaagatgattacatctttgtggtgtgccaattagcgatttgtttggaatcggttggcgactatcatggtgcggcgaccgttctggaagaaattccaaccgccaactatcagagtcatcctgagttacaatattttttagcaacggcgtatgcctttttaaatcagacgcaggctagctatgaattagcgactgcttatttacagagtgacgattcggatttcgatgccgaagccactgaattattacaagaattgaaaccaacaagtccatcaaactggtaaaacagtttggtagacttttttttacataacgggtaagatacattctatgaagaacgagcactttttaaaagtaaggggataatagacatggctaaaagttatgatgtaattgtgattggcgctggacctggtgggatgacggctgctttatacgcctcacgtgcgaatttatctgtattgatgttggaccgcggaatttacgggggccaaatgaataatacagcagaggtcgaaaattatcccggctttaaatcaatccttggtcctgaactaggcgaaaagatgtatgctagcgccactcaatttggtgctgaatacggctatggtacggtcaactcgattgaactgcaaggcgagatgaagattgtgcacactgacgaaggcgatttcgaagcgcgttcaatcatcattgcaacgggttcagaacacaagaagattgggatccccggtgaagatgaattcggcggtcgtggtgtctcatactgtgcggtctgtgatggtgccttctttaagaataaagaagtcgtggtcattggtgggggcgattcagcgattgaagaaggcctctacttgacgcaattagccagcaaggtgacagtcattcatcgtcgtgatgaactacgcgctcaaaagattttacaagatcgtgcatttgctaatgacaagatggacttcatctggaatgcacaagtgacaactattgaaggtgacgacaagaaggtaaccggtgtcacttatattgataaggcaactggtgaaaccaaagaagttgctgcaagtggggtcttcatctatgtagggattgaaccaatgactagtgcctttggtgatctagggattctaacggatgccggttggattaaaacggatgaccacatggcaaccagtgttccaggtatctacgcaattggtgacgttcgtgaaaaagatcttcgtcaaattacaacagcagttggcgacggcggcatagcaggccaagaagtatttaaatacttacaaagtatctagagtgcgacggcagccggttagcttccgaggattaacacagaatggcgaaggattgcggtagcaatcgtttgacattcagggttaaccagaaaagacagttcgaggaagcacgattagagtgcgttcgaaacgattttatttttgaggattaacctaaaaatgtggcttatgacgcacatttctagcggtcgactaaattttagtcggccgttttttattttggaaaaaattttaatttttagaaggacaagcattattaaataatcgacccagacaattagcttggtgcgcattaccgtacaaccgatgctttaggaaagcggttgattatggtatacttagaactagcttttagactaaaatgcgggggttacacaatgagctggcaagataattatgcaatttggaataatcaaacagaaatggatttacctttaaaaaaagcacttaacgaaatggcaaacgaccatgatgcattagaaaaagcatttagcgttccaatggaatttgggacagctgggatgcgcggtattttaggccctgggatcaactgcatgaacatttatacggtgcgtcaagccacagaaggcctcgctcaattcatgaaaacattaccagaagcgactaaaaaacgcggtgtggctatcagttttgattcacgttatcaatctgaaacatttgcgcacgaagcagcgcgggtcttaggtcaacatcaaatcccaacgtttgtttttgatgccttacgcccaacacctgaattatcatttaccgtacggcacttacatacctatgccggtatcatgattacagcaagtcataatcctaaacaatacaatggttacaagatttatggcaaagacggcgcgcaaatgccacctaaggaatccgatttaatcacaagttatattcgcaaagtaaccgatttatttgcgattgaagtggctgatgaaagcacattgcgcgaagccggcttaatgactttgattggcgaaaatgtggatcaagcttacttagctgaagttaagcaagtcacgattaatcaagaattggtcgacacagtcggcaagaccatgtcattgatttacaccccacttcatgggaccgggaaagtacttggtgaacgcgcattgcgtcaagcaggctttgaacaatttacaatggtcgctgaacaagcagttgctgatccagaatttgcaacgacaccattccctaatccagaattcccacaaacattcgatatggcgattgagctcgggaaagcacaacaagctgacttgttgattgcgactgatccagatgctgaccgtttgggcgccgctgtgcgtcaaccagacgggagttaccaattgatgactgggaaccaaatcgcttctgttttattacgttatattttacaagctagtaaagatgctggcacattaccagccaatgcagcggctgttaagtcaatcgtgtcaacagaattggcaacgaagattgcagcgagctacaatgtgaagatgattgatgtcttaaccggcttcaaatttatcgctgaacaaattcaacactttgaagacacagacgaaaacaccttcatgtttggtttcgaagaaagctatggctacttagtgaaaccattcgttcgcgataaagatgcgattcaaacattggtcttattagcggaagttgcagcttattacaagtcaaacggtaagactttgtatgatggcattcaagaattatatgcggaatacggctacttcgctgaacaaacgactgcagttgatttcgaaggggtcaatggcccacaacaaatggctgacttgatggttaaatgtcgtgaagaaagcccagttgaatttgccggcatcaaagtcgcttcagcagaagacttccaaacacaaacagaaacttttgcggacggtcatactgaacccatcaatttaccaacatctaatgttctgaaatatcacttagaagatggcacttggattgcgattcgcccaagtgggactgaaccaaaagtgaaattctatgtggggacatccgctgatgatgccgcaacagctgatttgaagttagcaaacttcgaaaaagcaattcatgaacttgtaaaatagatagggcttctgttttacatttcaggataacttacctataataaagaacagtaaatagacggactactgcgttagtcggtctatttttgtaagaaaagggaggtagtttggtatgggtatgcatcaatatttgcaaggtttgaataatttggagacactaaatcgcgcaccaggattgtttaaatatcaagaacattccgttgcagcgcactcctttaaagtagcagaaattgcacaattattaggcgatattgaagaagaaaatgggcaaacgattaattggcaagtgctgtacgaacgcgcactgaaccacgattatacggaacggtttatcggcgatattaagacgccggtcaaatacgcaacgcatgaattgcggacgatgttggccaatgtcgaaagttcattaaccgctaacttcattaaaaatgaaattccagatttcttacaagaacggtatcaacgtcgtttgagtgaaggaaaagatgaaactttggaagggcaattattagccgttgccgataagattgatttactctacgagtcttttggtgaaattgaaaaaggtaatcctgagaatgcttttctagaaatttttgcggaaagtttaaaaacgattatgcaataccaaaatctcgcatgcgcccgttatttcatccaagaaatcttgccagatttactgagtgaagacttcgcagatcgagggaagctaacccaattagtgagacagacgctagcggaatagagtgctgttgtcagtcgctcagattcagagcatttgcctaacttggcgaattgacgctataagcggcgatttgacaagtgtagcaaagcgcaggaatctactgacaacagcacgtttccacactttagttgaaacgtgctttcattaagcatccttttccggttagctacaccagccgcatcatcgactgcgtcgctaatccgtctggttaggctaatcctcaaaggataaccgcttaatgacgcactctttaatcagcactctggcgaaagtatgttcggtgtggtagaatagtgaatgacttaaaggacaaggaatattattctttataaaatcggtaagtagacgttatggtggagggcaacttctacccggcgtcttcttttatcgctagcaaatggtaatggaggcttttgatgattgaacgacagaatgataaccaatttgatttagtggcgccctatgaaccagctggggaccaaccagcggcaattgaaacgttaactaagaacttcgaggcgggtgcaaaagcacaagtcttgatgggggcgactgggaccgggaagacctttacgatgtcgaacgtcatcaagaatttaaacaaaccaacattgatcatttcgcataataagactttggcaggccagctctatgccgagtttaagcaatttttcccgaataacgcggtagaatattttgtcagttactacgattattaccaaccagaagcttatgtgccttcaagtgatacctacatcgaaaaagattcgagtattaacgacgaaatcgacaaactacggcattcagcaaccagtgcgctgttggaacgcaacgatgtgattgtggttgcgtcggtttcatgtattttcggcttaggtgatccgaatgaatatcaagatcacgtcctttcgttacggccagggatggagattgagcgcaatgacttattgcgtcaattggtggatattcaatttgaacggaacgacattgatttccaacggggccgtttccgcgtccgtggtgacgtggtcgagattttcccggcttcacgtgatgatcatgcgttgcgggttgaattcttcggcgatgagattgatcgaatcgttgaagttgacgcgctaaccggtgaagtcattggtgaacgcgaacatgttgcgattttcccagcaacgcatttcatgactagtgaagaaaagatggaaaaagccattaagagtatcaaggctgaattagaaggccgactaacggaattgaaggcggacggcaagttgttggaagcccaacgtttggaacaacgaacgaattacgatcttgagatgatgcaagaaatgggctattgctcggggatcgaaaactattcacggcacatggaggatcgtgcggcgggggaaccaccttatacgttgctcgatttcttcccgaaagattcaatcatgatgattgatgaatcccatgtaacgatgccgcaaattcgcgggatgtataacggggatcgtgcccggaagcaaatgttaatcgattatgggttccgattaccaagtgcgcttgataatcggcctttgacgctacctgaattcgaagaacacgtcaatgaaatcatgtacgtttctgcgactccaggcccttatgaagctgaacaaaccgatattcaggtcgatcagattattcgaccaactggcttgttagatccgaatattgaggtccggccgattatgggccagattgatgatttggtcggcgaaattaatgatcggattgaaaagaacgaacgcgtctttattacaacgttaaccaagaagatggcggaagatttaactgactatctcaaagaactggggattaaagtccgttacttgcatagtgatatcaagactttggaacgaacggaaattatccgtgatttacggcttggtaagtttgacgtcttaattgggattaacttgttgcgggaagggattgacgtccctgaagtctcgttagtggcgattttggatgccgataaagaaggtttcttgcggagcgagcgctcattgattcaaacaatcggccgtgcttctcggaatcaaaacgggcaagtccttttgtatgccgataagattaccgattcgatgcgcaatgcaatggatgaaaccaagcggcggcgttcgattcaagaagcctacaacgaagcacatcacatgacgccgaagacgattatcaaaccagttcgggatgcgatttcggttgttcaatcagtcgaacaccctgaagaagtcaagatgaccaacgagattgatttcgatagtatgtcgaaagctgaaaaactagaaatggtagaacggttatctgaacaaatgcggaatgcggccaagaaactggacttcgaacaggcagctacgttacgggataccatcttagagattaagagtgaaattgattaaaagaggtaaagcatggcaaatgataagatcgtcattcatggcgcaagagcgcataatttaaaagatattgatgttacaattccacgggataaactggtggttgtgacgggattgtcgggctctgggaagagttcgttagcgtttgatacattatatgccgaaggacaacggcgctacgtcgagagtttatcggcttatgcgcgccaattcttaggccagatggataaaccagatgttgattcaattgatgggctcagtcctgcgatttcgatcgaccaaaaaacaacgtctaaaaatccgcgttcgacagtcgggacagtcacggaaattaatgattatctccggcttttatgggcgcgggtcggtcatccaatctgtccgaacgatgggactgaaattagtagtcaatccgttgaacaaatggttgatcgtgtcttagcgttacctgagaagacgaaactccaggtgatgtcaccgattattcgtggcaaaaaagggcaacataaaaaagtatttgaaaaaatccaacgagaaggctatgtccgtgttcaagtcgatagtgaagtcatggacgttagtgccgatatcgaattggataagaataaaaaacacgacattaatatcgtggtggatcgaatcgtcgtcaaagacggtgtccggtcccgtttatttgactcgttcgaagcggctctgcgcttatcagaagggtatgcgactgccgatatcatcggtggcgaacaactacttttctcagaacactatgcctgcccaatctgtggctttacggtgggcgcgttagaaccccgcttgttctcgttcaacgcaccgtttggggcctgcccagactgtgatggtttaggggttaagctagaagtcgatatggatttagtgattcctgataccagcaagacattgcgcgaaggagccattgcgccttggaatccaattagctctcaatattatccacagatgctcgaacaagcttgcaagtcatttaaaattaacatggatcgaccatttagcaaattaacaccacgccaaaaagacattatcttaaatggttctcagggtaagaacttccacttccattatgaaaatgatttcggtggtgtgcgtgatgtggacgtgccgtttgaaggtgtattagccaatattgaccgccgttatcgtgaaaccaatagtgatttcacacggacgcaaatgcggacgtatatgactgaattaacgtgtcaaacctgtcatggtgctcgtttaaatcgacaagctttggctgttaaagtgggcggccaagatatcgctgccgtttcagacaacgccatcaaagaagctttaccattcttcgatcaacttgaactttctgaaaaagacagtgtggttgccaaaccaatcttgaaagaagtgcatgatcggttaactttcttgattaacgtcggtctggattatttaacgctcagtcggtcagccgggaccctttctggtggggaagcccaacggattcgtttagccacgcaaattggttcgaacttatctggcgtgctctacatcctcgatgaaccgtcaattggtttgcatcaacgtgataatgaccgtttgatcgggtcactgaagaagatgcgcgacttaggcaatacattaattgttgttgaacatgatgaagatacaatgcgcgcggctgattacctgatcgatatcgggcccggcgctggtgaactcggtggtgaagtgatggccgctgggaccccaactgaagtcgaacataatccgaaatcattgacgggccgttatttagccggttccgaatatattccagtaccgctagaacggcgtcaaggcaatggcaagaagattcgcgtgaccggtgcggctgaaaataacttgaagaatctgacggttgatttcccattaggtgaatttgtcgcggttactggtgtttcaggttcaggcaagtcaaccttagtcaatacgattttgaaaaaagctttggcacaaaagatgaaccgtaactcagcaaaaccaggtcaatataaaacaattacaggttatcagaatcttgaaaaactgattaatattgatcaaagtccaattggtcggacaccgcggagtaatccagcaacgtacaccggcgtctttgacaatattcgtgatttgtttgcgcaaaccaatgaagccaaactacgcggttataaaaaaggccgttttagttttaacgttaaaggtggccgctgtgaagcctgcaagggtgacggcattatcaagattgaaatgaatttcttaccagacgtgtatgtgccgtgtgaagtctgtcatggcagtcgctataattcagaaaccttggaagtcgtctataagggcaagaacattgccgaaatcttagacatgacggtcggtgaagccgcagtcttcttcgcaaacattcccaagattgcccgcaagttacaaacgattgtggatgtcggcttaggctacgtcacattgggccagtctgccacaaccttatcgggtggagaagcccaacggatgaagttggcctctgaattacagaaacaatcaacgggtaagaatttatacatcctcgatgaaccaacgactggcttgcataccgacgatatcaagcgcttgttgggcgttttggaacggttagttgaagaaggtaacacgatcttagtgattgaacataacttagatgttattaagactgccgatcacatcattgacttaggaccagaaggcggcgataaaggcgggacaattgtcgcgaccggtacgccagaagaaattgccaacgtcagtgaaagctatacaggccaatatttaaaacctgttttagaacgcgatacagcacacacaattgccgctcaggattaaccagaagatggttgatagaatgtgtttaaaaagcgggcggttaagacagaatgattgctgtcttaaccgcccactttttgttttgtcaaatttagttgtagattgtccgtaaaaaaagtatcataaaggtattaacaacgagaggtgattgggaatgtttagaaaaaatgaatggcactttgattggtcagaatttatgacggggattattttcttaatcgttgcatattgcttgtttaatcaaccaggtaagacattatctggtttggtaatcgtgattgcgattgcggcgattattcggggaattgccaaaatcagtgcatataatcggttacgtcaagagacagggatgcgcgcaacgttaatgttggtcgatgccattgtcgatgtcattttgggaattttgtttatcttgaatattccagctggagtggctgctttaggttatatctttgcattctggttcttgttcgattcaattgtggcattattgaatgtcggccatctcaagcaatttagcacaggcctatacatcgtttcgatgattctgaatatcttaggcgtaatcgttgggatcttattgttaatggatccagtggtgactgccgtaacgatggtgaccctagttggtttttactttgctttctttgggattaatgccatcatcatcgcatttgcaagacgtttatagtctctaaatttaatgattgcggaacaatttgattgttctgcaattttttttatggaaaaaataagctctttcaaatgcctagacattaggaatgaactcggtttaatagcattaaataacacgtgtcgagagtttcgacagctttcaatgacacaccaggaatgttacaatgataaaagcgaaaacttaaggggtggtctgatgacagatacattgaacttagtagtgattacagggatgagtggtgccgggaaaaccgttgccatgcaaagttttgaagatctaggttatttttgtgtcgacaatatgccaccgacattgctacctaagttttgggaattggttaaggagtccggcaaagtgactaagattgcattagtgattgatttgcgctcacgtgctttttacgatgagatcattgaaatgcttgctaaccttgataatacccaattcgtgacgactaagattctcttcttggatgcatcagatgaggaattggtttcgcgatacaaggaaacacgccgttcccacccactagcgatggaggggcgtttaatggacggtattcaaaaagaacggcgcctgttaactgaaattcgcaatcgagcacagatggtggtggatacttcaaccatgtcaccacgacaattaagagaaaagatttttcatgtcttcaagacgtcagataatccgtcattccatattgaagtgatgtcatttgggtttaaatacggtttaccaattgatgcggatatcgtcatggatgtccgtttcttaccgaacccatactatgtgccagcatttaaggaattaaacggtttagaccaaccggttagagactatgtaatggcgcagccagcgactgaaaagttctacgaacaatttagtgggctgttaaaagacatcatgccaggttatctcaaggaaggcaaaacaagtgtgacaattgcgattggctgtaccggcgggcaacaccgttcagtagcgcttgcccaacgattggctgatgatttatcgttcgattatccggttgacgtgacccaccgggatatgaagaaacgcaaggaaacggttaaccggtcatgacagctactaatcggattatccgggtcattaaagggcgacgaccaaaagtcgttgtgattggtggcggcactggactacccgttatcttaaagagtctccgtgaacagaatgcggatgctacggcaattgtcacggttgccgacgatggcggttcatccggcgttattcgcgattacattaacgtggtaccacctggtgatattcggaatgtattagtcgccttgtcagatttaccacagttaacgctcgatattttccagtaccgctttaaatcacacgatgcctttttctcagggcatgcgattggtaatttaattattgcggcgttatctgaaatggaatcaggtatttttgatgctgttcaacggttatcagaaatgatggcggttgacggtcatatttatcctgcggccaatgttgcgctgtcgttgaatgctgaatttaaagacggcacccagttaacaggggaatctgagattactgcagcacgcaagcagattaagcgtgtttgggtctcaaaaacggatcaagatgatactgtagcacccgaagccgttcaacaagtggttgatgcgattttggctgccgatgtggttgtcttaggacccggcagtttgtttaccagtattttaccgaatctaatgattaaaaacttaggtgcggcagtcaagcaaactaaggcggaagtgatttacatttgtaatatcatgacgcaaaaaggggaaacggaacactttaccgatgccgatcacgtccgcgtgttgaatgatcatcttggtcagaacttcgtggacacggttttggttaataccgcacaagtccctgaaaactatttggatcatcaaaagtacgacgaaattctctggccggttgaacatgactttgatggcttacgaggattgggttgtcgagtgatttccgataactttttgaagttgaaagatcatggtgtgttccataatggacaaaaagtagcgagtgaaattatgaatcttgctttccaggtcaatacagctaagcgaggtgaataatcgtggcctcatatgcaagtgaagtgaagaaagaactgacgcaacttgaagtgcatcctgaacatgcacgagcggaattagccgctttaattcggatgaatgggtcactgagcttgatgaatcaccaatttgttttaaacgttcaaactgagaatccggcgattgctcgccggatttatagtttattgaaacaaaattatcaagttgaatccgaattactagtacgtcgcaaaatgaagttaaaaaagaataatcaatacatcgtgcgcttaaagtatgataccaataccgttttaaaagaccttgatattgttgaggaggacggttttaccattcatacaaaggtgtcagaagatgtcattaatgaagatcagcgcgtccgttcttatttgcggggcgcttttctagctggtggctcagtgaataatcctgaaacaagccggtaccatttggaaatctattcattgtacgaagagcataatcaagatattgcgcgcatgatgaatcgttttggcttaaatgccaaaacgactttccgacggagtgggtacatcacttatctgaaagaggctgaaaaaattgctgattttctacaagtgattggtgctaccaacgcgatgttgaagtttgaagacattcggattgtgcgggatatgcgtaattcggttaatcgcttagtcaattgtgaaaccgcaaatatgaataagacaattgatgctgctacaaaacaaattgaaaatatcgaatacttgcgcgacaccgttggattagataatttaccggcgaagttgcgtgagattgcgctactccgtttggaatttccagatattacgttgaaggaacttggggaaaaaatgccgagtggggcaatttcgaagtcggggattaatcaccggctcagaaaattgaatcaacttgccgaagcccaccaacaggggaatggataagggacaaaataaataggtagtgcacaatatttgacttgtacaatataattaagtacaataactgaaggacattttatggaggaaaattatatggttaaaccagtattattagatgaacaactctgtttttcgatttaccgcgcacaaaaggcttacaatcacttctacggtaaggtattaaaaccttacggattaacatatccacaattcatcgcaatgcttgcattgtgggaacatggcaagatgtcagtgaaagaattagggcaccatttagaacttgatagtgggacactaacaccgcttttgaaacggttagaagctgatggttgggtaagccggaatcgtgcatcagacgatgaacgccgagttgacgttaccttaactgaaaaagcagaaagtcaaaaagaagaaatctacgaacgggttggtgcttgcacaaactatctcgatttctcaagcgataagtatcatgaattacgtcaagaaatgaatgaagttgaacatcatttgaatgcgattcaaatggataatgcacgtttttcataaaatgacggataaagggttccaaaagatttgatggtacattgaattttttggaaccctttatcgtacatacaaaaacaggtgccccgaggggggacacctgttttttattttagtagttgacttaagtcagtcatgtcaattgattcatcaaagatatggtcaccaagaatgatggtcgggacgaatttaatattggcacgattggcttcagcaataattgcggttaaattttctgcattatcttgtggcgttaatttgagattttgatcgatgtattttttaaattcatctggtgtcagatcattacgccatgttttttgatgcgtaaacaagaatgatagtgtttgcagcactatttcgggttgatcaaaaggtaaataggtatgggctaaattccccagttgtagatcctctttatccttatcaaaaggtttgataatacgttttagccgaccagctttgactgcttcagtcatcgtttcttcggattttaaaaaccacttgcggcaatagggacaagcgacgttgataaattcaattgatgttaatggtgcatctggctgaccaattgtaataccgccggtggttgtcacattctcgcttttaatcacactaatatccatggaagaccctcctttaagatactgccagtataacaaatttggtataaaaaaagggctagatcaacttgatctagcccttttttttactaatcctcagaagagaaccggtttattatctactctattttggttggttgaccataatatcgtcaatcaaaccgtaatcttttgcttcttgcgctgtcatgtagttatcacgatcagtgtcagcttgtaatttttcgaaggtttggcctgagttgtctgccaaaatttggtttaaacgtttccgagtcttcaaaatttcgcgcgctgcgatttcaatttcagtttgttggccttgtgcaccacctaaaggttggtgaatcaagacagttgagttaggcaatgcaaaacgtttgccctttgtcccagctgaaagtaaaacactggccatagaagcagccatccccattgcgattgtttggacatcagacttgatgaagttcatcgtatccatgatggctaaccctgcggtcacagaaccaccaggtgagttaatgtagattgagatgtccttatctgaatcttgcgcgtccaagaataataattgcgcaatgattgtgttagccatttggtcgttcacttcaccagataacatgataatccggtcttttagtaaacgagagtaaatatcgtaagcacgttcgccacgagatgtttgttcgataactgtcggtactaacattgaattgcctccttatataagccagagtagaatcactctgtagtctataaattgaattttacagcaaaggtcaattttggtcaaatagaaagcctcttttcagaaagattatggtcattttgtgttcgaactgaaaatatggtatacttaggaaagttaatcagcacttatcactgtagtatcaagtattatttgaagactttaatcaactggagtaaccatggagttacaagtagtgtaaagaggcggcttacgctgtttaaacgagaagatatttagaaacacaagaatttagacataattgaattaacccaaaaataaaagcgacgtgaatcacacgtcatctccactagccattcgatgctagtgtgcgtagccaattagtgactggctacctgacattatgtaagaatttaatatgcgaaattaattagaaggccacctaggaataggtggcctttgtcaatggtttaaagattgagttgttcatgagggggactcaatcttttttaggctatatttgtaagcgctattgtcaaaatgataatcgcgtgctattatatgaaattgaaccggttcaattatattcaataaagggagaaatgactgtgaaattcgtagataaactgtcagaaaagatgttgccgtttatttctaaaccaataatcagcggcatctaattgcaattcgggatagcttcattgtgacaatgccacttgttatggcggcctcgcttatggttttattaaatgcgctaattttctcaaacgccgctgttcaaaagattgttgatttaagcggattagctgacctagcaacaattgtgaataatgggacgatgagtattttatcaattgtggtctgttataacatcggtgctaatttagcaacgcattatgttcgctctggaaaagtgaacgatcctgcatttagtgcagttcatgctggtattttaagtttggtaacaatgtttattttgatgcctgtgacgagtaccgtcactttagcaaatgggaaaacggcggaagcaacaggtgttttcttgcaaagtttaacctcgtcatcaggacttgcaacagcgatgttagcagcattgattagtacggagttattcattcgttttacaaagtttgaaaaaatacgaatcaagatgccagaaggcgtgccaccagcagttgcaacctcgtttaattcattggtcccagaagtctcggttattttgatttttgctatttttgtatttattttaaatgtgacaaccgggttgaacgtccctcaattaattgaccttgcgattcaaacgccactaaaatcgtttgtattatctgtaccaggtacgttattcttacaattcttctcagatttcttatgggtctttgggatgcttggttctagcattttagcaccagttcgccaagcaccattgctacaagccattcaagaaaatatggcggccttttcagcaggacatgcgattccaaatattattacagaaccttttacaaatgcgttcggcttgattggtgggggcggttgtatcttaccgttagtgattgccatcttatgggcttcacggcggaaagatcaacggcaagttgctaaattagggttaacaacttgtttcttcaatattacagaacctgttatgttcgggttaccagttgttatgaacccaatcttcatgattccatgtgccattattccatcaatcaatttagtgattgcttattttgcaacaagcttaggtttgattagtaaaacggtagcggctgcaccatggattacaccgcctgttattcaatctttcttggcaactggcggtgattaccgagcagcgattttaaccatcttattaattggtttagatgtctttttattcttaccatttgtcattgcaagtaacaaaatattaactgaggaatgaggtttttgaaatgcagtatccatatcaagacgcagcgctgaccattcgtgagcgggtcactgatttactttcacgcatgagtacgcaggaaaaaattggtcaagtgaatcaacatctttatggatgggaaactttcgaagattctcagtcattaacgtttacagaaaaattcaaggcgcatgttgaatggggcggcggtgtcggtgcactttatggtttatttcgcgcagatccatggtcaaaagtgaactttgaaaatggcgttcgtgcacaggatagttagcgagttgctaatgaagttcaagaatatgtcatggcgcattcacgctgggggattccagcattaattgttgaagaatgtcctcatggccatcaagggcttgaaggaatctcgtatccaactaatattggccgcggcaatatgtttaatacgcggttaatgcagcaatcatcgcatttgatggcacaagaactagtgcttaaaggcgttaacctagcgcttgtttcgacgcttgatttggtcaaagatccacgttggggccgttcagaagaatgttttggtgaagatcccattttagcggcgcgaatgagtgaagccgttgtggcgggttttcaaggggatttaattcaaagtgatgttgctttcttagaccaacctgctaaaccgcgaacgactgatgccattggtgttgtattgaaacactgtattgcgcaaggtgaagcattgggtggccataattcaggcaccgtcacaattggccaacgtgaattttcagacgtctatgaaccccttttgagtagtgtcaagaatgcggcaggtgtgatggctgcttataacgatgtggatggggtaccgtgtcatatcaatcagccgttgttgactcaagatttacgggatgtaaatgggtttcaagggattgtgatggcagatggtgttgcgcttgatcggttatcaggaatctttgaaacacaaccagaagctgcggcggcagccttaaatgcaggtgtcgatctaagtttatgggatcagacattcctaacgcttgatcaagccattgaaaatggcctagtagacgaagctgccttagataatgctgctggccgagtactagcgttgaaattcctgttgggtctgtttgaacaaccctatgtacaagccccgaatgcgcaattgacggccttacttgaaaaagctgatgcgctgaatctgcaagtggcacgtgaaagcatgacgcttgttaagaacaatgggcttttaccaatccggaataagccgcaaaagattgcagtgattggccccaatgctgatgaattatataatctcttgggggattatacagcagcacaaagttcagcgcgtcaagcgcaaacaatttatcaagcgattcaagaaatgtttcccgagtcggaagtcgtgtatgcattaggctgtgaggtgcgtaattcaattcatcaagaagaggcaattgccaaagtagttgagcttgcgcgcgatgccgatttaatcatccctgtattaggtggttccagtgcacgtaattttgatatggccttcctaagtaacggggcagtgagttcaaaaggcatcaacatggattctggtgaaaatgttgatgtcgcatcacttagtctggggggccaacaagaagtgctgctcaagcaattgaaagcactaggcaagccaattgcatgtgtcatggtgcaaggccggccatacgatttaacactggtaaatgaacttgcagatgctgtattgattgcttggtttcctggtcaacaaggtggccgcgcaattgctgaaactttagtgggacttaataatccaagtggtaagttgagtgtgtcttacccgcgcaatacccagcaactaccggtttactactatcaacgcgatgctgctaaacaagatgattactatgatgaggttggccaaccgttatatccatttggttacggacttagttacgaccaatttgattatcgacaattagcggttaagcaaatggttgacaaactagttgtaactgttaaagtaaaaaataacggacagtttgtaggccaagaaagtagtttattatttgtcaaattaactggtggagcagttattcaacgaacgaagctgttaaaagctttccaaaagaatgccttccaaccaggtgaagaaaagagcattactttcgaactacctgctgctgatcttaattacatggatattgataatcaggtgaaacgtgcacaagcagtgactattatggttgctgatttagcggagaaaatcactttatcgatataagcggggaataagaatgtcatctgttagagaagtcgctgaattggccggagtctcagtcggaactgtttcacggtatctgaatgggcaacagcttaaagcagctaatcaagccaagattgcagcggccattgagcaactcgattacaaacaaaatattatcgctaaaggattgaagaacaatcaaagtttttcaattggtttattgatgaatagtatttcaagtcgatttggcgcggaagttgtttctggaatagaacaacgcgttgagcaacaagggtatagtttattattaagtggctttagtgaccaaccagcgttaattgatcaaaaaattgattatttaatggcgcattcgattgatggtttaattgttttcttagcaggtgaagaatggcaaggaatggaacgactagcggcacttgatattccggttgtgacgattaataacccaaatcagctacgcaatgttaattcgattttattagatgaccgcgtaagtgtggcacaagtgatgcaacaaattgttgatttcggacaccagaatattgggatgattgccgctaatcaggatgattatgttgcccgtgaacgactggcaggtgctaaacagacgatggcagcttatccagacagacagttacatgtttttgaaggtgactattctcggactagcgggtaccgcggtgcccaagcattattagccgaaggtattacagctttatttgtcagcaatgataatatggcctttggtgcgctcacttatttatcagaaaatggtattcggattggccaagatttactatttggtcactatgattatgccgatgaacatcaatttggacagtggccaatcctatcgattcaaccgccaacagaagcgattggattggcagctgctaagttgttattagatcggctccaaaagaagactcagtcagatggtcaaacgattttaatgcatcatgaaatcaatggtctaaactgaatcatcgaaaagggcgagtagaataatctacttgtcttttttgagtttaatccttaggttattaatttacccgtccccgataatggggtacacttgtggtgtacattattttgcatgattattgaggagggcttggcgtggcacaaaaaatgattttggatttagatactgggattgatgatgcgttagcaattgcttatgcattgggatcatcagaagtcgatttaatcgggattacctcagaatacggcaacgttttgactgaacgaagcgttgtgaatagtcaacaaattttacatttattaggtcatccagacattccagtttatttaggggctgggcattcgacgacgacgcatgattttagcgtcttaccaattagtgcggaaattcatggtcaagacggcgttggtgagattcatctgacagagccccatccggaaatggcaactgaatcagccgttgattttatattacgtgcttgtcaggcgtatggggctgacttgagcatcgtggcaactggcccgatgacgaatttagcgttagcgattcaaaaagatttaccaactttgaagaaagttggtcaaatcgtgattatgggtggcgccttaacagtttgtggtaatgtgtctccatttgctgaagctaatatcagtcaagaccctgaagcggcggacttactctttaagagtggtttgccggtaacgatggtgggccttgatgtcacgttgcgcacactttttacacgcaccgatacggcagaatggcgcgcactcggtacaccagcagccaaagcttatgccgatatggttgattactatatcaaagcctatgaagtcacttctccccatttgcacggctgtgccttacatgatcccttagcagtcgctgttgcaatcgatcctagcttagtcacgactttcccattgaacttgaagactgagatagaaggcccgtcacgtggacgaacaattggggataatgcccgcctagatgatccagcaacgcggacggcggtttgtgtacaagttgatacgccgcgtttcttaactgaatttaaatcaagaattggacaattattagcgcagtagaatgagccatatagaatttcaaaaaagagctacgacaaaagtcaattttttgtcgtagctctttttttattgtacaggcgactagcaagaataagtcggctaacatgtagtgtgaatcatgattgctgagccagtcaattccttgattggcgatggcaaaagctttttgaaagtggtgatcttgatagagtgccagactatacaggtagaataagatattaatgttctcgtcatagtgcgtgaaccgccctgcattcacaattgcgaggacgtgttcgaagtcagtttgattagtatggggtgtactcttaataaagctgatactactgagaatcaaaatctcagtaggcgttaaaacttgttggcgcggtgtaaacgtatagtcgagtgccatttgtagttcccgtaaactatccgtggttgtatgaagttcttggaatactgcgatgccatgatagtagtagtaggtctgtaaatcggtcgccagttcaaggtgttcggccaagccagtcgcatccaaataatctaacataccgcgataatcgtgtgcattgcacagttgtttaatttgttgattgaattcgggttgttgatcaatttcgggataatgacttaacagcgcttgttctaacggcatattaagccgttcgcagagttttgctaacaaaatggcgtttggaatataagtgccgttttcaatatgactaatcatcggttgcgaacaaatatcctgggctaattgatgttgggacaagccttgcgcacgacgaaccgtagcgagtttacgccccatggtcgcggcaagtagattatcgggaatagctggcactactaacacctcacttcatatgattgctttaaatttaacatgcaattttcaaaaagaaaaggagctggactgcatgccagtattgattattatattagggtttgcgtttattttccaaaagccattagtgtctgcagttaccattgtgtttggcgcgctattgggtctttggttactcagaggaataatcgtcttgatgatgttgataacacttggccattattggcgtcagaaaaattaaaaaagaccgctgaataagcggtctttttgattgcttagaattgatagtccgggtcaataatcaaaacgggtttgattgtttcacctttaatagaggcttcgttggcagtgttgatgtcttcgaattgataaaatttttcggttttatcaaaggggaacatgccttgacggtagaattcgattaaacgagggacgtcgatttgcggaatggagtcacccatgttgacgccgacgacggatttgtcgttgacacataagtcgttccaagtatcaagatcgatgtggtttggggttacggcaattgttgctgacaccccaccttggcaaagcgccttaattgaatcttccatgactggtgtaatccccgtggtatcgacacagaagttcacgccgcgcccatttgtgagggcttggattgctgcgacaacgtcgtctgtttgacgactgttaatcgtatcggttgcaccgagttctttagcgagtgcgagccggtcgtcgatgatatcgacagcgatcactttcgtacaacccgaaattttaccggccatcatggctgcgagtccaacagcaccagtcccgaagacggcgattgtgtcgccaggttttggttttaaagtatttaaaacagtgccactaccggtcacgtatccacaaccgagtggtccgagtttgcgtaagtctaaatcgtcagggactttaaccgcatttcgttcgcggacaacggttgtggttgtgaatgaagattgatcgaacatatcggcaacgtgatggtcattttcagtaaagtgggaactaccatcagggcgcacgccggataagttattttctgcgtagttgaggcattgtgttggaacgcctttgagacagttttcacagatgccacatgcgtagaatgagagaacgacatggtcgccaacttttaaactttgaacgtttgaaccgactttttcaataattccggaaccttcgtggccgaggacgattggatagccaataatggcgtcgcctttacgaagcgcttcgtctgagtgacaaatcccactagccaccatgtggacttgaacgtcgtctgggtggagtggtgcgagttcgatgttatctttaatgacaaatggtgcgccttgttgttcaacaacagctgctttaattttcatgcaatgaccttctaacttaattatttaattcacaagattattatagcgttggtgaaatcgttttcaattaaaaattgacattggcgctaaaattgccaaccatgttgttctaagtcccactggcgcttaggcagaccactcacatacgggttaccagcgacataatagcgataaggaagttgaccactcgctgctttataattgaccccgattcgtagcgcggtgacaattgatttggggtggcgacgatgcgctaaatcaatcattaaaggggcgtccgccacattttgaaaagtcagttgtttatcgtgaatgccgagggcgcccattaatttaccggggccgttagtcagttcgacgccaggtttcgggcgattgaggcgcatttgttcaatgccatgggtcggttcgatggcgcgaatcaagatgccttgtggttgatccactgcttgggtcacgatatcaaatagaaagaaaccgcgtaattgatagatataaattgtaccaggctcatgatagagcggctcgctaaagggtgtgcggcgcccattgtaagcatgcgcggcagtgtcatcggtgccgacataggcttctgcttccacaatgaggccgccaagtgtgccttggtggctggtataaagcaagtgagttcctaataaatcttgcgcgatggcttgggtagaccggttcgtaaaaaatgatggtgctgctggttggcttgttgtcataattaaaacctccgagttaaaacgaatcagctttattttaacaccaaagacatgacatttgtcatccgtaagtcatgacaaaatcgtctaacgacaaaacggaatcacttctatactagggttattaaatgaggtgatgacaatgattgaaattaaacaagtgacaatgcaattcgaacaacaagttgttttaaatcaggtagacttaagtgttcaacctggtgagattgttggcttagtgggtgcaaacggcgccggcaagtcaacattgattaatttaattttaggccgactccaaccaacggctggcgagattcggattttaggtcagaagccaacggagaaagaacatttcaacttattgggtgcgatgatgcaaggaaatgtccgactggctcgggtcagtgtcatcgaagaattagaattggtttgcagttattatcaacagccacggtcagtcgctgaattattaacgctagctgatttgaaggcacaggctcataagatggtgtcccaactttcaggtggtcaattacgccgcctctcctttgctttagccatggcaggcaatccggatttgctatttttggatgaaccgaccgttggaatggatgttggcagccgacaaaaattctggcagcaaattgaacagttaaaagaagccggcaagacgattattgtcacgtcgcattatttagaggaaattgaacacattgcaacccggattttattattgaaagatggccagttccaattcgatggtgacttggcaacattacaacaacaatttaaaggaacgcagattcgttttacgactgatttaccagcagctacttttgcaaaatggccaggcgtgatccgcgtgacgaagactggggccaaggtgctgttgcaagttaccaagagcgatccgatcttaagtcaattagcaccaatgatggggatccaggttcatgatgtgcaggttcaagcaagctcattaaatgaaatttatagcgaaatgatggaggactaaaaaatgcaaacaatgatggtacaaacaaaaatagactttaaacgcgcatattggcgtaatccacgctttgttattttttcactcttaatgccgattgcgttttatctcttgtttacgaaagtaatgaaacagggtgtgatgaatgcagcattcaatcgacaatacatggtcagtatggcgacctatagtttagttctcagcaacacgtttactttatcgacattactttataatgacgcacgggatggcttggtttccttaattgatttatcaccaaccagtcatcggacttattatggggctaagttgttgaacttaggcttaatcaatgctttaacgatcggcgtcattttcatagttgctgggattagtaatcaaattcatttagtgtggtccagttggttattaacggcgggctggttgtggtttgccagcatcctcctttgtttaattgggattagcatttcatttttaaaagatgaaaatcagattcaactggtgtctaatttgttagctttccccttagcaattttagggggattatggtggccaacagaaataatgcccaaaacagctcgcgtgattggcaagcatttgccggtttatccgattaatcatattggccaagcgctgattgcgcatcaacccgcacacttgggtgaatatggcatcacgttgctctgggctgggttattactggtaattgtcgtatacttaaaccatcataaaagaggagcgatgcatgcatgaatttttttaaacgctacattgccatgccaccccaatatggcttatttccatatgtttggttgattttcttgctctttccaattggttatgcgtttccgtatcaaacggttaagcagcaagcgattatgggcttgattctgattttcttggtggcttatcgcaatgggtatgtcgcatcgcggtatcgcacattctggattatcttacaaatggtgaccagtgcgattttagcagtcattatccaggcgttttatctgaatatttatactgcctgggtgtttggttcgattcccatgcgccgccgaagtttctggcgctattactacgcttatctgttgtcactaatcataccagcggtcaccctatattggtattatggtggtcatatgggacgcgatgatctgattggcttaatggtgtacggcttgttctgcatcttttcaccatttgcggctagctcgattcagcgttttaatcggaaaaatcgccaattaacgcagaccaatcagcgattaaccgatatgattaagcagaacgaacggcaacaaattgcacgggatttacacgataatttaggtcagtcattttcaatgattacgctaaaagcggaatatgcacgtaaattattggcgaaaaaaccggccgcggtacccgaacaactactcgagattgaacaagcctcccgtcagaatttaaaaatggtgcgtgagattgttgctggtttacgccaagtgaccgttgctgaggaattgatcaatcaagaacggaatctcagcgttgcaggcattttactgctgactaaaaatgaagaccaacttgaagggattccacaacaaaatcaacaagtgcttgcgcaatgtttacatgaagccgtgaccaatataattcgctacagtcaggcaacggagtgttacgtggtttttaatcgaaccgcaacgacttttcagatgcagattgaagataatggtcgcggattgaaaagcgaagatcaatataagagtcatgggattgtgggcatgcgcgaacggttagaaacgattgatggagggaagggcatgattaaactttatttggcagaagaccagcaactattgaataccgctttagcgggcattctggatttagaggatgatttgacgatggtcggaaccgccgtcaatggacaagtcgcacttgatcagattgaaaccctccaaccagatgttgttttgttagatattgagatgccgggcatgacagggcttgagattgcgcgccaactacatacgcgtcagccacagattaaggtgattattctgacgacttttgcccaaccgagttatttcaagcaggctatcagcaccgaagtggcagggtatctattaaaagatggcccgagtgatgacttgattgtggcgattcattcggtcatgaagggcaaagttgtttatgcgccagaattagttgttgggctgacaacgcaaacgaagaatccactgtctgagcgggaaacggaagtattgcgtgcgattgctaatgggttgagtacgaaacaagccgccgaatcattatttttatcggatggaacggttcgcaattacatgtcgacgattttaagcaaattggatgcaagcaaccgcgttgaagcaattcagattgcacggcataatggctggctgtaagaggcagtaaaattgcctctatcatgattgttctctatgatgaaagcaaacaaggaggacgaaacaatggcattagcaaatttgcataaatgggcgtttttctatttttcaccagacttttcacctgaacaaaatacggtgattaaccgtaatccaatgggaacgtgcgagatgattaccgtcgggttcgatccacgtgctaaagaagatggttcaattattgaagtcgctaagcaattgaaggcagaaggcattcaatttattgaactctgtgggggcttcggaccaacctggacgactaaaattaacgaagcactagacttcgccatcccagtcggagcagtcatgtatggtccagaattcagaaaacaattgtttgaaataatgaactaaagagtgcgtcaaaagcgggtatactgcgagcattagcctaacaaggcgaatgattgctgaaagcaatcatttgacttgtgtagctaagcacagcagtatgcttttgaaagcacgtttcgaataagagtgcgttcaaaccgtttatgttctgaggattagcaaaattagacgaaaaagcggtgaagccgcttatttggctaattaggctaaacgcaggaacatggtttgaaaagcacgtttagaatgtgccgtcagtcgagaattccgtctaattaatattgtaggcctttgtaaaagttaattttacaaaggcctctttttttaggcttattatttaacttttgactgatgatttggtatactctacttattaaatgtaaggaggcgtgtcatgcaaagagggcggcagttcttaaaacttagtgttagtgcaatttttatattcggggtgttcttattatgccaagtttcgggggtgcaagccaaacaggttcttcagcttggcgcgcaagcaccactagataccattgatatttcgacttcaacgggatatggtcaaacagggaacatttatgaaagtttattccggcttggtgagaacggtaaaattgaaccaggcttagcgaaatcgagttcagtttcagctgatggtaagacgtggacatttaaactgcgtgatgccaagttcagtaatggtgacccgattcgggcgcaagattttgtctattcatggcaacggacattgaaaccagaaaccaaatcaccttatacaaaccttttcagtaatatccaaaatgccccagcgattgcaaaaggtgagatggcaccagaccaactcggcatacgggcagtggatgagcacacgttggaagtcacattatccacacctgtggcctacatgaaaaccttgatggcttatccattatttgccccacaggatcaaaaagtggttgaaaaatatggtaagaagtatgcgacgaatgcgaaatacatggtgtactctggtccgtttaagttagttaactggaatgggacgagtgagaagtggcaatttgtgaagaacaatcaatattgggatcgcaaaaaggtaaaattagaccaagtcaactataccgtgttagaaaataccagcaccgcgctttatctttatcaggaaaagaaactggatttaacccagttagataatcaacaaattgataattatcgggatgataaagcattccatagatatccttatgcgttgacgaactacattaaatataacttcaaatcagcagatgaacagaaaaaagcacttttgaataaccaagactttagattggcgatttcgttagcgattaatcgtaagacgttgaataaccggctattcggttcgaagaaaaacgatattactggtttcgtgccagtgggcttagccgactcccctaagaaggtggactttgctaaatcacaagccgtgccagataccgtggattacaatcaaaaattagcgcttaaacattggcatgaagcattgaaatcgactggtcaaaagaaagttgccctcaccttaacgcttaattccgatgatgccaacgcgtcatatgttggtcaatatctcaaaggtcaacttgaaaaagtcttaccaggcttcaagttgacattaaagaccgtgccaagccaagtttcagcgagtcgtgataaaaaaggcgactatgatttattactcgcaggttggggggcagatttcaaagacccaatttcgtttttagaaatcatgttaccaggggctgcaagtaataccggtggcttcgacaatccagaatacaaagctgcccttgaccgcgcaatgaatgccgatgcgaacgatcctgacaaacgttgggcggacctcgtgacagctgcgcaagtcatgaataaagtccaagggattacaccactctatcaaaatgatacggcatacttgaagaatccaaaggtcaaaggcgttgtgcataacacagctggcgcacaatggagctacaagacggcttatattaaatagcgtgtgaataatcagccagttatagcctgaggattaacaagaaaggcgccagtccaaaatctattttttggctggcgccttttttgtataaacaaatcattatggttctgaattttgctgtgctaaagtaagggtattcaataaaagaaagagggaccttaaatggcaaaacaatatgaaacaacgatgattaatgaagggggccgcaatggcttcgtttattcacccgatcaagcaaagaaatatgtaatcaagtcaccagggacagacccatcagggaagagtacaaatccagagcaactctttgcagccggctatagttcttgctttaacagtgccttagatgttgtccttaaccaagaacatattaaaggcgaacccacgattaaggcgactgtttccctttatagtgatggccctgccaattattatattggtgttgatcttttcggtcacatcgaaggtttatcagaagaagaaacaatgaagtatctcaaaaaagcagacgaaatttgcccatactcaaaggcaactcgtggcaatattgacgtcacgattaatgtgatgtaaatcatcaaaaaaaaaaggaatcagcgactgctgattccttttttggtggttaagctttcgatgaatgtggtttgccttcttgtttgaggacggattgcacggctgggtcttgtcgcatgtgttgatcaaaacggtccagattagggaagtcagtcaatgaaaatgcgagtcgtcgataccaattggtcatgacgaatagataagcatcaggagcactgaattgattagcaactaagaaggactggtccgctaacgctttttcaacataagcaatccgtgggaaaacccgtgaatggactaaatcttggctttcgggtgtattagggagccaattacctttacgaaatggtgagatgaagttcttatgcaattcggtggtgatgtaattcaaccacatccgttgttgccagtattgttcagtggcatagtcggccattagtggcagcggactttggtggctaatgtattctaaaataacggcgcattcagtcatgaaatcgcccgattcagtttgtaaggctgggacgtaattcttctgattgagctgatgatagtcaccaagtgatgtggtatgggtatctaagttaactggcgtaacggtgatgaattgcaatgatggtggattataatggaattgacgaaagatactgtaattgcttttttgaaagcgttatagtaacgttgattaaagattggggggatcagtgatgagtacgaaagactattttaaattttttacgagcaccactttgacgggcgataataatcgtgcgtatttgatgacagtgacgcgggcaatcaattctgagcaattgaaaagcgtgctggggaatactgtgacttattttaatcagtacggtgacggctttccgtttacttcgccgtttacgattgaccagttgaatccaatcgtcactgaacaaactgatttacaaccgactgaatttacgattattaaccgcgcaggattacatgggattggcaatattcttgcctaaaaaagggattgagacaaacgttgtgtttgtctcaatcccttttctgatggtcaaatctaattgtctaagcgtgctcgggaaatcccagacttccgtcacactcttttaatttctagcatatttatgttcatcggtatagctgaaaaaatcggctttggcagtataatcaccgcgataaacgccgttccaaccagcacgttggccaaacgcgcctaaatcaatcaataggtgttcttcatccttggtgagatgaatcttgccaaagccaacactatagatgtaattggccaggcgattgacgagtgcctcgggattcttaaccgtatcaattttgaggtagacctgtagtaaaacatcggtaatatctaacaatgcatttgatttatccggatgcgccattagactgttgtaaagtgtatggatgttttcttttgcaattgattgacttatcatttatacccctccaaataacaataattcacactaattatagttccttttagttatttgtcaataatgtagataagcgttatgattgtctcaacagttgattaagagtaagggacgattgaatatgaaatggtatgtaggtggacaggaacgtgggcatcgagcaattacaatgattaaggcattattaaacgacttgaaacaagatgaccaaacggcaccattacaatcagttttgcgtagttatcaaactgaaattgaagcacaaacgacagcagtaccattaattttgagccgaatgaacatcgcaattgcgaatgtgattcaaaaagaaggcttggatctatcagccagtcaacaagctaagttaaaagaaatgacggcattatcgatgattagatatggttattagtttagtaggggatccagaaagaaattgttgaagatcggaacgttatgccatcggattagcttttttatagttttattgatattagtgatgttcgtccatatggaagcccttttcgggttgagtacaaattatatgacgacgcatgaaccagcattgattactgttaattttggggtgtggctaataatagtctttttgtttactagaatttatatgagacaaccaaaacctgactggcaaaatgtgtaaagagagccgatgctaaagaaagttgtacttattttagtgatgtttggtatcgtgctagtgattgattggatcgataaacgttggaacccattagcgctgccggagaatcaagtctatattaatgagctaatgaaggctgttccgattttgacgacactcagcaatgatttgtttgcaccaacactagaagaattattatttctggtattttctttaatctcttttttacctcaattgtcaagttaagtgcaacactaatggcctattcttataattggtctagaaagttaaaccagttgtggcataacatccgctggacaactatagcttaaacagcggcggggacggtgattcagcgtgtcttgaaccaactgcagatccactaatgagaggtttttaaaggaatacccctttgggaagaactctcttaattgaccattcacattctcattagtgccccgttcccagggagaatatggatgggcaaagtagatttccgttccttgaacctgatttaaactagcgaattccgagccgttgtcaaacgtgatagtccgaaagttttctgcaccgtaatcatcaatcgtatcttggagggcttgccggcaagtctctgcccggtaatcaggcaatttaacgataatttccatccggctaactcgctcggttaacgtcattaaagctggttcggactcaacccgtttggctttcactaagtcgccttcccaatggcccaactcctgacgtttccgaaccactgcgggccggtcttcaatggactgtccaagccgttttttattcaggcgggcatgtcggtgattcgggcgtttaacgcggcgacgtagcttcatgggtaaatcatagttgtgaagctccgggagcttgccagcctcgatataccgatagaccgtagccgttgatgggcagggaaagcccgggtaatgagctttgaaatagtggacatacgtgtcgacactgaaaactcgtggcttagcttttaaagctttcggcagggacttgaagaacacggcagcccgctgcagtaaacctttggggtgacacttggcccgctgttctcgatagtaagccgccccgcgctcggcaaagtagccctgatatgaccgatgtttctgggaatcaatctgggtggttaacccgcgttttaattcgcgagaaatggtgctgggactccggtgaagccggctggcaatctgacgaacgccaaatcctaatcgagtcagggactcaatttgaccgcgttcaaaagattggagttgttggtaatgcttaggcatgatattcttagtttgggtcatgaagacacctatccttatctgttgattttgtcgttaataataagaataggccttcatggccttttaagctagtctaattggtctagttatcaagtgttgcacttcaattttaaatcggggaatctcttttttattaaaaaaacgaatgcgatacggtgatgaaaattattgtatcagggcttgcttttgggtgtgcgcatcagctgaaaattgactataattggcttatttattgttcatttggatggatattgggcagtacctatttttggacgaaggatattagatgttcaatagtgctccatatgctcgttaatctatttttaatagcacattgtagataaaatgatttaaatgaacgattataatgacagctaaaaagttaacgactgatttggtcatgttgaacacctcatcattttatttcatggctactctagtgctatcttgctggttaaacaactagaatgagaacttaataaccaccaaatgaaagcgttctaatttaaggccgttttgttttgacaatgcttgataagtggcttacatttaattgtgaaggatagcacaacctatccgcagacatttgtgtcaattcaaatggaagaggtggccagaatggcaacgaatcaattagtattaaaaactgcagacatttgcgatatccgggatattgaggaagcacgggcaaccattaaaccgtatattcgcgaaacacctttaattcaatcgatgttcttgagtcgtaatgtggcgcacggtcatgtctatttgaaattggaaaatatgcagctgacgggatcgtttaaattccgtggtgcgaacaataaaattaaccatttaacgccagagcaacgggctaaaggcatcattacagcttcagccggcaatcatgcgcaaggggttgcattgaccgcgaagttattagggattgatgcgaccgttgtgatgccagaagaagcaccgcttgctaagcaacaagcgaccgccggttatggggcgaacgttgttttacatggtacgacttttaatgattcgcggttgtacatggagcagttagcagccgaaaagggcttaacaattgtccacccctacgacgatcgcgaagtcatggccggccaagggacaatcggccttgagattttggatgcgatttggaatgttgatacggtgattgtaccggttggcggtggtggcttaatctccggcattgcgacggctttgaaatcctttaacccctcaattcacatcattggggttcaatcggaaaacgtgcacgggatgacggcttcatttgaagcaggcacaatcaccagccatcatgcggacttcacgctagccgatgggacagacgttgcgattccaggtgaactgactttcccagtggttcaaaatctagtcgatgaaatgattttagtttccgaaaaagaaatcgcaactgcgatgaaggatctcatgcaacggactaagattgtcacagaaggcgctggtgcattaccaacggcagcactgctgagtggtaaaattgatcctcaatggttaacagataaaaatattgtggctttagtttcaggcgggaatgttgatttaacccgcgtttcgggtattattgaccaactcttccacccagctgatacaagcaaaggggttgttggataattaaaaagccggcatccgtctaaaaacggatgtcggcttatttttgtgctgcaagaaaggctggaccatgatcgtcaattagggcgtgaaattcttggcagtctttaacagtcatttggggtaagagctgtggttcaataacctgttgtacctttaaatagtggaggtcttttaaagaacagtgctctaggtgagcaattaagcggcgggcatataaatcagcgataaagactgggcggtcgaagacatataataaaatgacatcggctgtttccggaccaatgcctttgatggcaagtaactggcgccgtaggtcagtggtggttgtcatctgattgagcgtgtctaagtcaaaatcaactgtcgctaaaaatcgaaacagccctttaattgtcctgcttttagcgttattgaagccgctgggtttaatagccaacataagggcttcatccgaaagagaaagcagattgtttggctcgaagtgcgtacttgatcgtagattggcgagcgagcggtcaacattttgccagtttgtattttgaactagaaccgcgccaaccattgtttcccaatgggaatcagaaggccaccagtgttgcggcccatattgccgatacattgtttgaaagagttggtagtaatcaattttaccgttcatgaaaaatgtctccttaacataaaaagacgctacttcacctttggcagtcacttattgtcaattcgcttggtgcgcagttgtagcagtttggaagttgtggctaatgagatggtggtcaaaatgatgaaaaaagtggttgaaagtaagaaacgcggcatctgcgcctcagaaaattttaaaataatcgtggtaagggtactaaaagtggtgaggatgtttaaaatcatgagtgaaatttcgtagttgcccgattgtttcgaaatgacgtggccagcgtataataagccaacgccgaacaatatatatgagaaatagaaaataccgaagaaaacgatgagaatagttaatgattctttggcgtagacgagaatatcggtactggtaaagatgcgaatcaaagtatttagaatctgataggtgagataaagtgttgctagatagataaaagtggggaagtttcgtttgataaaggccatagcaatctccattgtttttttattgtaaagcttgtcactattctagcatggaatttaagaatggtcagttgaaagtcagccgagaatgcgtttttatttgtaattaatatcatatgcgttatacttgagttgtgtaaaatagaacaaggagtgatcaatgtgaaaattatcgttgtcggttcatctcatggtggatttgaaacagttcaagaaagtttactcgattatccggatgcaaccatccaatggtacgaacaaggcgatttcctatcgttcttatcctgtgggatgcaactctatttagaagggaccgtcaaaaacgttgatgatgtcagttatgcgacaccagaaggcatgcgggcaaaaggggttgaagtcaacctacaacaagcaatcaccgcgattaacgccgatcaacatacggtccaagtgaaggatttaaagaataatacaacgcgtgaagaaagttacgataagttagtcttgagtgtcggcgctgtgccatttgaattaccagtgccaggccgtgatttagagaatgtctacgcaatgcgtggccgtgattgggcgattaaattaaaggcgaagacagttgatccaaccgttaaaaatgttgtggtgatcggttctggttatattggcattgaagcggctgaagcatttgctaaagctggcaaacatgttacagttgttgatgtcttgccacgtctattaagtctctatctcgatcaagaatttacagatcaattaacggctgaaatgcaagcgcacaatatctatcctgcagttggtcaaggcgtcaaagaatatgtcggcgttgacggtaagctaactaaagttgtgaccgatcaagctgaatacgatgctgacttagtcatcgaagctgctgggattcggcctaacacaggctggttaaaagatacattacaactcgaccgcagcggccggattgaaatcaatgaattcttacaaacaagccaacccgatatttttgcagtcggggatgcaacggttgtgaaatacgcaccaactggcaaagaaatgccaattgctttagcaacgaatgcgcgtcgccaaggtcgctatgctgctaagaacttagtcaccgccaaccaaccggtacccgctgtttcaggttcatcagcattgagcgtcttcgattatcactttgcttcaactgggattaaagaaggaacggctgataaaatgggtgtgaagacccaatctgttttggtttctgaaacatatcgcccacacttcgtccctgaagcagaaaatccagtggtcgatttcaaattaacctttgatccagaaacacggcgtgtactcggtgcgcaaatcatgtctaaagctgacgtgacggcaaacatcaacgccatttcacttgccattcaaggtaagatgacaatcgatgatttagcatatgctgacttcttcttccaaccaggttttgaccgtccttggaacatcatgaacgtcgccgcccaaaaagcacaacgacttttagacaaataaagtgcaagcagctgtcaattgaagattgatggctgctttttgtgctgacatggttcgccaaataggcttgatgaagacggtgattgtcattggattcgtgtattcagctggtgtattgctcttaacggggcttacgcttggctattcaagtgtaagacgttggcttagaaagaatcgctaataaaaaaggattggggatcgataaaaatatcgattcccaatccttttttactatattacccaataccgatcacataatatgcgagtttatcggcgtagtgtcgttggttattttgttgtttagcttgcttaaccgcggtgagattgtcggtgaccacgccgtctgcaccgaaatacatcatgcgttggacggcttgttgatcattgggtgtccagacaaagacggccttattttcctgatgtgcagcttgaatgaagtgactgttgacagttgtcatttcaacggcataaaaatcagcgttcgaaattggtgggccgataaaattaaaggggagaatgtagcccgtttgaatcttcggtgctgcctttttaacggcctcgacgatgtgccagtttaaggattgcaccatgtgaccgtgagcttcgatattggcctgatacttattcaggaaatgttgcaccaagccgggattatcggtggtgggtgtcttaatttcaatcagtagtttttgatgaagctgattggcgcgtgcaagatagtcatcaaatgaagcaattggtgcggattgccgatgttcatggacggtcattttagtcagttgcgccagtgttttagactgcggggtccctgagtgcccagtgagtggggcaagttggaagtcgtgaaagacgacgaattggtgatctttagtcaattgcacatccatttcaacataatcgggctttaatcgggtagtttttcgcagcgcactaatcgaattttggacgccgtctttttgcgaaacgccacggtgggaaatgcttagcggctgctgaatggttactgaacggagatagtcccaattataagtcccaacgccgattaaaacgcaatttgctacgaataataaccaacgaccactgagcggcacgcttaattttaaggttgcatagttgaacgtcggttgcacaaattgtgggtcggccaacaaataatcaatgacgatgaaaaagacggcgactgtcgaaagcaccaagttgatgagcatagcagcttgcaacaaggtcatgatgaccacggcacttggcagtcccactgatgtgtgggtttcaatcaacgcttgtagttggatgagtaggaaaaaagtgagtcccgtaaagccaatcagtgcggcaccgattaagagtagacgccccagtaatgagccaattttttgatgtgtaaactgccaactactggtcaacgcttttttgaaagtcatctgctgaagaatgatgtttggtagggtgaagatcagccgtaagccgagatataataagcccaaatagacaagaatgaaaagtcccgcgacaattcgccgattcatgagaatataattcagaatgaatgccggtattttaaacttagtcaataaatcagaatgatagccaagcccgcccagcggtaaaattaaaagacaataatatagaaagaaaaagaacgtgccaattcgaaggtgcctgagttgcgcaaaagtcatcttcagcaatgcctgcaaagctagcggccgtttaatctgaataaagtacacacttaatagaagaaacgtgaattcgaagaaagccagcaataaaattagtagcgcaattcctacgagtgctaacagcgcaatcggatgctgatgaataagcgctggcaagttgctcaacgcgagaaactggatctgattatgtaccagaatgaagtagctggctttactcaaaagcggtagacaaattaaaagcaaaaagccatgcatcaataacacactacgaaaataggcctgggactgctttaaaaaagtgaatgtacttgtaaatagggttttaaaatactgcattgaatgggtgctcctcaattggactcgtaatgagataattgtacaacaaatatagaagcgtgtaataccgattaatctttgtatttaatgaagagtttattatagttattaagttaatagtatgaatgaaattactaaagctatcttgtggaaataatgaccaaaaaatatttaagcgcgcgaactcggaccaaacatacatatgctttttataaagagcgacggaataatccgcaatggcgcgacgattttattcaggttagatcgcaaagaagaaaagcattatttattcaaacgattgttatcctaatcataattgcaggaggcgcagtttatttttctaaagcaacgccaatgaaacgtgtggttgaacaatcagccactagttcaagcacaacagctagaactgaatcaacaaaggaaccatctgcagatccggcgattgcaattagacataatagtagcgatgaagaacaagtatcgattagtgaatctagtaatagtatggcatcaacagagtcatcaaacgacaatcatgatacaacgtcatctacaacaatggcagatgatgacgttgattatatagcagacggatttctaatggcgcctgtaaagtacaatggtgaagatgccacagaagcgatggaagcaaatcgagcgccacaaaatttaattcacgatggttatacaaacggctatattaaagatgacacgactgtgcgagtatcaagtatgggtacagcatttaatagtagttaccaaatagcagatggcgtgtttgtcatccaacttgatgcctctcagcataaatttagatattccgtaaataacggtagcgttagttttgaaaatgaaaaattggatgaaccagatggtgcaagtgttgaactccaattaaaaaaagatacaaatgcaagagaagtagttgattctcgtcagttacagaattagtacaataaaaaatcccgttagaagtattttacttctaacgggattttttataaatgatgcgtcacccgggagtcgaacccggatctcaagaaccggaatcttgggtgctatccattacactagcgacgcattccgcgtactcaacagtacaatatattatattagcggagttaagcggaaatttcaagtgtaaattttgataaatcgcgataaatcaacgtttaaaaaatattcggaaagaaaacgtattcatcaaccccaaagcattgcatctgttttctgcacttgttataatggtcttgttcaaaaggataagttactagttttagtaagttgccttttattttttgccaaccatgggtcgactaatgacacagatggacattttatgtcccacggaaagtaggcgatagcaattgcgcgatgaattatctgcaatagaagcggttgcgccagatttcgtcggtatcattaagaaacgttaccaggtgttacaacatatcgattggctcgcgccagttggccgacgaacgcttgcggaacaactgaagatgagcgagcgagtaattagaactgagacggattttctgaaagcacaaggtttgcttaattcgtctaaatcaggtatggttttaaccgtgaaggggaatgaaatcctcgatcagttaagacaagtaatggatcaattcttagggttacatcagactgaacgtcagttgagtcaagtcttaggcattgaacattgcttgattgtttctggcaatagtgatgaacaaccaaaagtcctcaccgaaatgggcaaattagtcaatagtacgttacaattattattaccacaagggcaaagtattgtggcagtgatgggcggaacgacgatggctgaagcagctcatgaactttcaactgatctatcgaaacagcgcaatctaatctttgtgccagctcgagggggaattggtgaaagtgttgatattcaggccaatgcagtctgtgccgaaatggctaagcagacaggtggtaagcatcgggcattgtatgtgcctgaacaggtgagtgagaagacgtacgcgcctttgttagaagaaccaagtgttcaagaagtgttaaaactgattgaacgaagccggggtgttttacacagtattggtgaagccattacgatggctgaacgtcgtgagatgccgattgaaaccatcaagatgcttaaagaaaagcatgcggtgggtgaagcctttggttacttcttcaatgcacaaggcgaagtcgtgtacaagattccgcgaatcggattacagattcgtgacttattgaatattccgtgtgtactggcggttgcaagtggtgcttctaaagcccaagcaatccaagcgtacatgcaccttgcacctaaacagacgtggttaatcacggatgaaggtgccgcaaactcgattttacaaggggcaaccctttaaaataaaaaatttttcatttcctaaaggaggaaattctattatgactacaaaagtagggattaatggtttcggacgtattggtcgtttagctttacgtcgtatttacgcaacaaacagtgatgtattggaagttgttgctatcaatgatttaacatcaccagacatgttagcacacttattaaagtatgatacagctcatggtcaattcaaccacgaagtatcagctacagaaaacagcatcgttatcgatggcaagaacattccagtttatgctgaatcagatgcacgtaatattccttgggttaagaatgatggtgttgacttagttcttgaaagtactggtttctacacatcagaagaaaaatcacaagctcatatcgatgctggtgctaaaaaagttcttatctcagctcctgctggtgctgttaagacagttgtttacggtgttaatgatgacacaatcacagctgacgataacatcatctcagcagcttcatgtactacaaactgtttagcacctttagctaaagcagttaacgatgctttcggtatcaaagctggtacaatgacaacaatccatgcttacacagctacacaaaaattacaagatggtcctgatcgtggtggtaacgtacgtgctgcacgtgctgctgctgctaacatcatccctcattcaactggtgctgctaaagctcttggcttagttgttcctgacttgaagggtaaacttgacggccacgcacaacgtgtcccagttatcactggttcattgacagaattagttgcaactcttgacaaagaagttacagctgacgaaatcaacgctgctgttaagaaagttacagaaggcaaccaatcatttggttacaacgatgatcaaatcgtttcatcagatatcattggtacagaattcggttcagtattcgatcctactcaaacacaaatcgttggcggtggcgcaggccaagttgtcaaagttgttgcttggtatgacaacgaatcaggctttactgctcaaatgatccgtacattagaaaaatttgctagcttaatctaatttcacttttgtgaacttaggaatgcgatagcattttataaggcgggaggaggtaaactccttccgcctttttttatgaaaatctaggaggtttgtccacatggcaaaacaaacagttgcagatttaaaagatattaaaggcaaaaaagtcttagtacgtgttgactttaatgtaccaatcaaaggcggcgttatcggtgacgataaccggatcgtagctgctttaccaacaatccaatacatcatcgacaatggtggcaaggcaatcttactttctcacttgggccgtatcaagagtgacgaagataagaaagaattgacattgaaaccagttgctgcacgtcttggcgaattattaaacaaagacgttgctttcgttgcttcaaacgaaggcaaagcattagaagatgcaatcaatgcgatgactgatggtcaagtattggttatggaaaacactcgtttccaagacatcgacaacgactttggcaaacgcgaaagtaaaaacgatcctaagttgggcgaatattgggcatcattaggcgacatgttcgtaaacgacgctttcggtacagctcaccgtgctcacgcatcaaacgttgggattgcaacagctatgaaagctaataacaaacctgcagttgctggttacttattagaaaaagaaatcaaattcttgggcgaagcagttgacgctccagaacgtccatttgttgctatcttaggtggcgcaaaggtttctgacaaaatcggtgttatcgaacatttattagctaaagctgacaaagtcattgtcggtggtggtatgacttatactttctacgctgctaaaggtttatcaattggtaactcattagttgaagaagataagatcgaattggctaaagaattaatcgaaaaagctggcgacaaattagtattgcctgtagataacgttgttgcagacgcattctcaaacgatgctaagacagaaattgttgaaggtaacattcctgatggctacatggcattagatatcggacctaaagcaattgctgacttcgaaaacgtccttaaagatgctaagactgttgtttggaacggccctatgggtgtgtttgaaatggacaactttgctaaagggacattggcaatcggcgaattcttaggtaacttatcaggcgctacaacaatcgtcggtggtggcgattcaacagccgcagttaagaaattaggcgttggcgacaagttaacccatatttctactggtggtggcgcatcacttgaatacctagaaggtaagacattacctggtatcgctgctatttcagacaaataatttaaaattaaaaggagattttctcatgcgtaaaccaatcattgctggtaactggaaaatgaacatgaacccaactcaaacaactgagttcgtgaatgctatcaaagccaacttacctaagtttgatcaaacagaatcagttatcggtgcacctgctgttgacttacctgctttattagaagcagctaaaggcacagacttaaaagttgctgctgaaaactgttacttcgaagatgctggtgcattcactggcgaaacttcaccaaaaacattgaatgaaatgggtgttgattatgtcatcatcggtcattcagaacgtcgtgattacttccacgaaactgatgaagatatcaataaaaaagcacacgcaatcttcaaaaacaacatgacacctatcttctgttgtggcgaatcacttgaaacacgtgaagctggcaaagctgaagaatgggtttcaaaccaagtaacagaaggtcttaaaggcctttcagctgaccaagttagctcaatggtcattgcttacgaaccaatctgggcaatcggtactggtaaaactgcttctgctgaccaagcacaagaaatctgtgctgttgttcgtcaaacagttgctaagttatacgaccaaacagttgctgacaaagttcgtatccaatacggtggttcagttaaacctgcaaatgttaaagaaatcatgggcaaagaagacatcgacggtggtttagttggtggcgcaagtatggaacctgcttcattcttagacttagttcactttaacgactaatttttaacgcattcctgtttacgaatggcgtaaaattagctaaaatagatgtaggctttgcctgacatccaaaaaagcgctaatgcttagcattagccaaaaaaggagaaaattacatgtcaattattactgatattttaggtcgcgaagttttagactcacgtggcaatcctactgtcgaagttgaagtttacacagaagatggcggctttggtcgcgcaatcgttccttcaggtgcttcaactggtgaacatgaagctgttgaattacgtgacggcgacaaatcacgttttggtggcaaaggtgttttaaaagctgttgaaaacgttaatggtcctcttgcaaaagaaatcattggtttcgacgctacagatcaacgcggtatcgatgctgctatgattcaattagatggtacagaaaacaaaggtaaattaggcgctaacgcaatcttaggtatttcattagctgctgcacgtgctgctgctgacgaattaggcttaccattgtacgaatatcttggcggccctaatgctcacgtattaccaacaccaatgatgaacgttatcaacggtggtgctcactcagataacaaagttgatttccaagaattcatgattatgcctgttggtgctaaatctgtacgcgaagctatccgtatgggttcagaaactttccaagcattgaagagtcttttatcagctgacggtaaagttacttctgttggtgatgaaggtggtttcgcacctgacttcgcaaacaacgaagaacctttacaatacttgatcaaagctattgaaaaagctggttacaaaccaggcgaagatatttcaatcgctatcgacgttgcttcatcagaattatggaacaacgaagacaagacatacaaattacgttggtcaactggggaagaattcacaacacctgaattcgttaaataccttgaaggcttagttgctaaatacccaatcatttcaatcgaagatcctatcgatgaaaacaactgggaagactgggcatcaatcactaaagaacttggcgaaaaagttcaacttgttggtgatgacttcttcgtaacaaacactgattacctacgtaagggtatcaagatgggcgctgctaactcaattcttgttaaagttaaccaaatcggtacattaacagaatcattagaagcaatcgaaatggctaaagaagctggctacacagctgttgtttcacatcgttcaggtgaaactgaagatacaacaatcgctgacttagttgttgctacaaacgctggccaaatcaagacaggttcaatgagccgtactgatcgtttagctaagtacaaccaattaatgcgtattgaagaacaattaggcgatacagcttcatacaaaggtatcaactcattctacaatatcaaaaaataattgaatatgttcgtgtcggcacattttgaggtttaacagcccgcgttaaaggattatgtttgtagtcttttgacttagggggttaccattgaatatggcgagcaaaacatatctagtaagagcatcttttaattaagatgctctttttttgtgcgataaattgaccggataaggtaatggattggattaggctagcaactaaataaacaatccccagcataaccggttgattaagaaaagcttatggagcattgcgcaataattaccagaataatcttgcaaataattacgtttgcaagcggatacataaacattagactatagatagcgtagagggattgaaacgaggagttgcgataagcatgaacaaacgagaacacgctattattcaatatagtttggcccagcataaaacgtactatgtcgacattgccgcacagttacagctttcagagcgcaccattgcaaccaccttgaatgatatcgaaagagccctttaatgtgaaactcgttcgaaaaccgaatgacggtatttattttaccggggatgtcgcgacattagccaatcatcttgaaaaaaaggccaatgatcgtccccaatccaaggaagaacgctgtcattgcattctggctaaattattattaggttcagcatcgattacgattcaacaactttctaataccctatacgtgagtcggagtacagtcgagaatgatttgaaaaaggtaaagcaaaaactcgcgcaattcggtcttcaattggcaatcacgcataccggtttatccttaatcggttctgagcatcaaaagcggcaagcaacggtggagttaatcagtcagtattggggaaaacggactgaggctaaagagttaaatggacagttagtgcgccatgttcaattaccggataatctgaatcaactgtttgaaccagccttgattaaaaacatactcacagctttagcggaattaattgaaaaaagtacgctatcatttactgattacgagtttcagtcgttagcgattcatctgatgatgccagcaccaactggtggaagcaatggagcccaaccagtggtgacaccgttcattgccgaaacacagctgttagtacagattttagaacggcgatttgaattgacaattccggattttgaacaggaatatctcaaccgtcatttagtaacggtccaatcgaaggatacatctgttcaaactatccagaccgagttgcggcaatcagtcgggctgccacaactattacggcaacagcttgctcaattagcagttgatgaggaattaattcaggggttagcagttcatttaagttcggcacttcgccggcttgcaatgggattgagtattaataacccatatactgatgaaatttgccagaattttccgcaagcctttgatcaagcagtgttactaaagccggtgcttgaaaatcagtatcagattcaaatgaatgaggacgaattagcctttattagtttacactttgaagctttttttgaacgacattcagaagatgcacgcttgagtgttgtggtggtttgtagtagtggcattgggacatcgcaattattagggcaacggttggccaaaacgtttgctcaagaattacggattactcgtattattgccttgggagaactacttgcaaccccgattaaggaatcgctagtcatcagtacgattgcgattaaaggtttgtcagtgccggtgattgaagtcagtcctttgttaaatcggcatgatattggaatcattcgccagatgattactgaacaaccgacgcctaccaatcacttagtagctttattgcaacccgaactgacaattgtcacgcaagagtagttaacggatcaaggcgcaattgaattaattggtcagcggctcattgatcaagggtatgcaaagccaacggttgtccaggcagcgctggcccgagaagctttagcaagtacggcacttggtcgagtagctttgccgcatgcggattcacaattaattaccaagccagccattgggttgctgattgcaccccaaagtattaattggcaacacaacgacaaagtgcagctcgtcttctttatggccttgaacgaaactgttcatggccaaatgcgggcgatttatcatgatttagaccaattgattgaaaccccccgtcttttaaagcaagtcgcacaagcatctgatgggacggctgccctcgccatcttggcacaattgaatcagaaaaattagaatggagtgttaccagatgaaagaatttgatgttgaaaatatttttacagatatcgttgttggggatgataaaccgacggcattagcaacactagcgcaattatttgctgataagaatgggttagatcgggttgcattaaccgcgggattcaatgcgcgtgaagctgagagcacaactggttttgggaatggggtggcgattccacacgcgaaagtggcgggattaactcaaccagttgtcggaattgtcacgtttgaaactggtgttgattgggaagcattagatgacgcaccagttgaaatcgcgattgccctaattatgccgctcgatgaccctaataagacgcatttaaaagtgttgtcgaagtttgcgcgcaagttgatggatgacgcttttattcataatttgaagcaaaatcggcatgatgcaatggcactctacacgttagttaacgatgaaatcgaatttaactaggaggatttagaagatgaaaaagtttgttgggattacaaaatgtccagttgggattgcccatacttatatggcagctgaaaaactgcaaaaagccgggcaagctcgcggatatgaagttaagattgaaacacaaggcgcttcaggggtagaggatgaattaagcgccgcagatgtggctgatgccgatttcgtgattattgccgctgacgttgccgttgatggggaagaacggtttaatggcaagccagtactatatgcgaagaccgctgaagctattaaagattctgatacactgattgaaaaagcactaacggcaggtatttatggcaagaatcagccgaaaacagaagctaaacaagaggacagtcatgaacaaagtccaattattaagcaattattaaatggggtttcccatatgattccgtttgtcgttgtcggtgggttgtttattgccttgtcaatcgcgattggtgggcatccgactaaagcaggaatggtgattccaccacataccatttggagtagtatgaatcagattgggacgattggttttaccttaatgattccaattctcactggttatatcgcttatgctatttcggggcgtgcagctttagcacccgcaatgatcggtgcaatggtcgccaacaatacagacatccttggtacaaaagccgggactggatttattggtgcgattatcgttggttttgcggctggttacttggttaaatggtttaattcatggcccgtaccaaaagatttacggccagtgatgccaatttttgtcattccgttattaggggttgggattatctcagccgttttaattctcgttttaggcgcacctatttcatggttgatgacggcactacaagatatgttaacggccctttcacaaaatccagaaacgagtgtgattcttggcgttgtgattggtgcgatggtcgcgattgatatgggtggcccagttaataaagtggccttcttattcggggtggcatcgattacggctggacatccacaaatcatgggtgctgttgcttgtgccgttgctgttccaccattggcattggggattgcaacatttgttcgtcgcgatctttatacagaagaagaaaaatcagctgggattccagctatcttaatgggcttgattgggattactgaaggcgccattccatttgcaacagctaacccaaaacaagttttcccaagtatcattgctggttcagcagttgctagtgcagtcgggatggtcttcaaaatcaccgatgcagtgccacatggtggcccaatcgttggggtgttaggggcaaccaataatattggtttgttcttcctctcaattttggcaagggttgctgttgcggtcgcaattttaaccacatttaaagtacgaaaagcacggaaagcttaatcttaaaagggcacacgagtaatcggcgctctttttttgtgggtaaaaaagttatgaacatgcgcttttttgaattatataaagcgctgtctatcgaattttgataaaaactggtataatagagccaattaaggtaaaaaggggtggcagtcgtgaaaaaaggagatcgccaagcacgaatcgaacaaatcattaatcagcaagttatttcgacgcaagaggatttattagcaacgttgaaacaagatgggattgatgcaacgcaagcgaccatttcacgtgatattcgggagatgcaaatcgttaaggcacgggatgtgaacggtgagctccgctatacgatttttcacgatgacgaacgcacccaaactcagaaattaaaagataaactgcgtgaagtggctttgtccattacacaagtgcaaatgttaaacgtaattaagacgctcccaagtaacgggaatttattagcagccttaatcgatgatttggggtacccagaagttgtcgggacgctggcgggtcacgatacgattgttatcattagccctagtgaggaactagcagccgaattaaacgaacgtttcgcacaacatctagcaacagcgagataagcaaacaaataagacgttgcgacaaaagtaattttttgtcgcaacgccttattttgttgagctaaacatgttctgtgttaatcctcaggagatatccggctgataactcactctttaatctacatactggttaaaaatgtctgggatgggggctgttactgttctttgtttatccgtgaagggctctgtgtagcgcaacgtttgcccgtggagtagtaggcgctgtgttgaatcggttggaaagtacaacggatcacccaaaatgggatgaccatcagccgccaggtgcaagcgaatttgatgtgttcgccctgtttcgaggttgactgccaaggttgctgcaggtccttttcgatgcagtaattggtaatgggtcactgcggataaacctgtgatgtaatcaatcgtgcgtttgcgcttattgtatggatcgacaccaattgggaggttaatcgttgcatgttccaagagtgtttgttccggatcgttagcaatagcgatgtattggcgcgacattgttttttgactaagctgtcggtttaaaatgccgatgacgattggggttttaccaatcaagagcacgccactggttgcttgatcgatgcggtggaccatgtaggcctttttatcttgtttagcaagataggccgccacttggttcattagggtgaagttttcaccaggaccgttcggatgggttttaatccccgccggtttattgacgaccagtaaatcatcatcttcgtataaaacggaaaaagattgccgttcatcaagttcgtagtcttggaccttaacggaaacttctgagaagttcatcgtaatttgatcgccagcttcaacgtgtcggttgaaggcgagataatgtccgttgaccaaaatatcttgattaatccgcaagaaatgttgcattttttgcggcactaaccagtgattcagcaggccgcggacagacatcggactaaagtcgggcgctaaagtcacttttttttggtaaattatcattagagttcaaccacctttaagctattagtttagcgaaaattggtgtaaaagtaaattttaaaagattgttaatgtcttcgattggcatcagtgtcaattgacgaatatgctacaattaaacaagattaattttgaccgtaagaagagggatcgcatgaacaagcaagcttcgccgttttggttggcgattaaacaatttatgaaacgcgtctggcgcgtgattcgttatgtctggtatcgactacaattgacgagatggctgattctcgctgttttaattctcattttcgcgatgagcagctggctcacgtttaaagcgaagacggctaacgtcggtgagattaaggccaacttacaaaccccaacggcgctttatgacattaaggatgaacgcgcggggacgttatattcgcaaaaagggacttatgtcgatcttgataagatatcgccgcagattcaaaatgctgttttgtcgactgaagatcggaccttttataccaatcatggattcagtattaaagggctagcacgagcagcagttgggttagtgattcatcatgggcagattaccggtggtgggagtacgattacccaacaactcgccaagaatgccaagttgagtcagaagcagacgttctcgcggaagtttgaggaattattcttagctgttcagattaccaaggtctattccaaacaggatatcttagcgatgtatttgaataatgcctacttcggtaacggggtgtggggcgttcaggatgcgtcaaaacggtattttggtaagaatgcgagtgaattagatgctagtgaaggcgccgtgattgcagcgatgttgcggagccctagtttctataatccggctgaccatttagataatgcgactgcgcggcggaacttaattctcggcttgatggtcgataataacaagttgacgcaagcacaagccgacgctgctaagaaagagcaacttgtcgtgacgaatacctacgagcagtcggatgggtatcgttatccgtattactttgatgaggttgtgaatgaagccattaaccgctttgggttgaaagaagaagacctcgttaagaacggatacaagatctatactgccctcgaccaatcccaacaaagtaagatggaaaccacctttaaacaaaattggttgttccctgataacgctgcggatgacaccttagttcaaggtagttcagttgcaattgatccgaaaaccggcggggtatcagccgtcgttggtggtcgtggtgagtatacaatccgtggttatagccgcattacacagatgaagcgtcaaccgggatcaaccatcaagccattggcggtttatacgccagccttagaagatggctaccactatgattcatcacttgaagataagaagcaaagctatgggactaaccactatacaccaacgaacccggataacgtttataccggatcgatgccaatgtatcaggcgctagccaacagtacaaatgcgccggcggtttggttattaaatcaaatcggcctcaaacgcggcattaagtcggtcgaaaaattcggcatttcagtacccaagagtgaccaaaacttggcgatggctctaggtggttggcaaggtggggtttcaccttaccaaatggccagtgcttatacggcttttgcgaataacggtgaattgtctgaaacacattttattcggaagattgttgatgcgagtggcgccgtgattgttgataataccgaaccatccaagacacggattatgagccaaaaaacagccaaagaaatgactagcatgatgttgggcgtttataataatgggactgggcgttatgcgaaacccaacggctatcaagtcgcagggaagtctggtagtactgaagtgcctgatagttatggctttgggaccaaagatcaatggttagtcggttatacgccggatattgttgttgcgacttggatggggtatgacaagacggatcaagatcactttatgaagaacactagcattgacggtttagcaccaatctttaaatatgagatgcaacaactcttaccaaccacagcacagacggactttgatactgaagatgctcaatcgttggcgaaaaaagaacagagtgggacatcgaacgaattagtcgattcaattgaatcgggttttaaagatgggataaataaagcgaaagatacagccaatcaatggtataataatttgaaaggttttttcaattaaatacatggaaaaaggagtcagtacaatgacagttaatatttatgatgatgccaaccaaatggcaacgcacttgcaagaattaccacaatttttaggcttacaaaatgcctttgcagcattgaaaaaagacgatattgccttcacaatgtttaagaaattccaaacgcaacaaatgacacttcaacaaaaacaaatgcaaggtcaagaattaacggacgacgaaattaaagaaatccaagaacttgctcaaaaaattggggacatcgacgcaatcaagaacttgatggaacaagaacgtcaattaagccaaacaatggatgaattaaaccaaatcatctcaaaaccaatcgcagatatctaccaagcatagaatgcgtttgaaacgggtttggctttgaggattaacctaaaaatgagactgatggcgtattttgtcatcagtcttattttgtagttaactggaaaagtcagtttcaaaaagcacgtttcaaataagagtgtgactgattgcggtcagcaactgagcattaatacaaaaatcgcgttaatccaggttctaggattaacgcgatttttaaattaagcggaagttgttgcaaccagaagcacgtttcaaacggtgaatcgattgatttcgattcaccgcttttttattgcctaaaaacagaacgtttgttctgatcgcctttatcacaccgcgtggcaatggtataatgaagcttatctaagctggttacgaccggccaaaagaatggggtttttcaagatgaaatttatccatgcagctgacgcccatatcgacagtccgtttgtcggattaaaacaagcaccgacagcattgtgggaaacaatccatgcgtcaactttcacggcgtttaaaaaattaattcagacagccatcgatgaagccgtcgattttgtattattagttggtgattcatttgatcaagaagcgcagagtttgccagttcagaaatttttaaaacaacaatttgaacgtttggcagatgtcgacattccggtctatctgagttacgggaatcatgattactgggatgccaatcaagtgcattttgaattgcccgccaatgtccatgtttttggagcacaagtagagtcgtttgaactgactaccaaaggacatgagagtgtgaccattgtagggttcagttatgatcaacggtggttgtcagctgatcgagtggttgattttccacaacgtgccagcacaacttacacgattgggacgttgcacggtagtcaaaaagcaacggccgatacagatcactacgcaccatttacgattagtgaattgaacgcttgccattacgattattgggcattaggtcacattcataagcgccagattctccaagaacgaccagcgattgtttacccggggaacttacaagggcggcataagaatgaacctggtgaaaaaggcttttatttagtggacaccaaagatggtcagttcgatttaacgttcaaaccaacgacggtcattgagtggcaacgtcaacagtttgaggtgacacctgacatgagcttaactcaattgcaaacggctttgagtgcccaattgatgcaaagtgatcacgctagtttagtggcgctagagctaacacacgcggagcgattatcgagtgacttattgcaacggattaataatggtgaattattggcagtcttacaagaccaattggaaaatagtgaaccactgtattggccatacgcgttgaagttgcggtttgcagcacaacagcaatttagtcagattgaccaagcctactgggaccaagcggctgcagctatcttgacaccggacaatattctggaaaaagcaaagccgttaatgaaggaaaactttatccgggaagcaattgaaacaccagaatttcaagcggatctcaaggacttagtcacgacaattctacaagagaagaagatgggggattagccatgcgaattaagacagtcaccattttgggcttcggtaagtggcatgatcagacgattgatttgaataccgactatcaagtcctttatggtcaaaacgaggcggggaagacaacccttacagcctttattaaaggcgtgttattcggctttgcgaccgctaaacaacggtatgaacaatatgtgcccaaaaacggcgcgcaatacggtggtgaattactggttagctatcatgatcgcgatattgtgattcggcggctttccggtaagtttgggggcgacgtaacggtcatcgatcaaggccaagaatttggcgctgattacttagctgacctcttggcaccagcggatgaagctttgtttacgcagatttttgaaacgaaccaacaggatttaaatcagatatttaatctaaaacaggctgattttttgcagcatttattgacgattggtgcggtggggagtcatgagtggctcgattttgccaaggaactggataaggacagtcagaaaattttcaaaccctctgggcgtaagtggccattgaatgttgctttgaagaattatccagagttagtgcaatccgttaacgaagctagtcgtggttatcaagaatatgaaacgaacgcacgtctattgcagagtaccgttgcgacgatgacggaacaccaaaagcaagtggctgaattaaaacaacgccaagcgcagttgcaacatttgcttgatcgttggccaagttatgcggaatggcaagcacttcaaactaaacttgaaaaggcaacgccgtttgacttaacgattgacgaacaataccaagcattagtggtcgaacgagaacgcaatgcaaaggcgttagcagaagcaaaatccgaggtagcaactgttcaagaaacattggatcaaacaggtgaatttcgattttatcaagctaatcaagagacgttggtgccattgtttgaacaattaaatgaacagcaaaaacaaattcaattacttggattacggcaaaaccaaagcgcacaactcgctagcgaaaaagcccaattagcagcgcagtatcaatggcaaacggatcaactaccaaatccgttgacagatgagcaacgcgcacaactagaacaagccgaagctgaaatgaatggggcaaccacgaccagtcaagtgctgaccaagcaactggctgatttagaggcgcaattagccacgcaaaacgcggcagttagtcaggttgaaccacaagaaacgccaacgactgatggacgtgccagtcaattgagtatgctgattggcgtagtcatattcatgattggtcttttcttgccgggcgctctgaaagtcattgcggtcgttggactagccgcacttggctatggtggttacatgatgtggcaaaataaacaatctgaccatgaccaaccagtgcaaaaacaagcttggcaacaagcgctcgctaagttggatgtgttgcaggctgaaaagcaaaccaagacagctgccttacaagcacaacaagcaatattgcagacgatgcacgaacaaagcgcggtattattggcgcaaactggctacgaaacggcgatgccaatcagtcaagttttagcgatgcagcatgctttaagccggatgactcaattgaccatggcgctcaaacaacaacaagccgaaaatcaagcaatcgaagcggcactaaatatgtattgggatgcgtttgcttttgcccgtgattgggtgggggcgttacagggcagtcatgaagagaacttgtcccaggtgagccaattcaaagcccggattacccaactcacacaagaccttgcacaaagcaacgagagttaccggtattatcaacaacaagtgacacgcttaacagacacgattaaagaacaagacgctgcacaaacagcattgttagcaaaggctaacttaacaaccgccgcagaattagccagttgtgttgctaatgaacaacagcgccgtgctaatgaacaacgtcaagctgatttaaaacgcgaattggcaacggacttgtcggctttacaagcaatcgctagtcaagaacagcttaagcaacaagccgctcaaattacagaacaagtggcaagtttgacaagtcagttacaagaacagcaacaagctgttgcgcaactacgcgtgacgcaagcgcaacttgtcgataatgacagttatcaacaacagcgacagcgacaattacaagaacaggctaagattactgatttagcccaagagtggcttgctaagcagttagcaattgattggattcaagcgacgctgaaggccgcttcacaagaacggttcccccgtttattggaaaaggcaacgcagtattttgcaattctaacccagaatcggtatattaagattaacttcgatgacccactgatgacggttttacgggcggatcaagtgctttttgaagtcggtgaattatcacaggggactgcagagcagttatacattgcgctacgctttgcgtttgcagaagaggtagctgacgtagtctcattacctttattggtggatgatggattcgtcaactttgatgatcaacgccaaatcgccgtttggacattactccaacgactcagtgcggccaaccaagtgatttatttaacggccaatccgcggacgcaagcacactttgaagcggatcattggttaaatctagaggaagtggggctgacacatgacagcaaagaaattatttgattaccaaaacgacgagaatctggatttatttgtactaattaaaacggcagacgtgcggattgctaaaaacggcaagcaattcatcgcgtttacgttccaagatcaatcgggacaaatcggcggtaaatactgggatgcttctgatgaagacgttgctaaatttacggcgggtcaggtgatccatttacaaggtaagcgggaattataccaaaataatccgcaagttaagatttataaactgcgcttaacgacgggggacgaaccgcaaacagttgaccagtttattcctaaagcaccggtgcaagtaaccgagatgcaagacgaatttggcgcgatgttattcgaaattacaaacccaaattggcaacgtttggttcgacatttaatgcaaaaacatcaagcggaattcttcagttttccagcggctaagaccaaccaccacgcgtttagtggcggcttggcctatcatacactttcaatgttgcgcttagctaagacgattgctgcccaatatccacaaattgatgaggcattgctatatgctggtgttatcttgcatgatttaggtaaaacgctagaattgtccggtcctatttcaacggaatacacggttcgtggcaatttgatcggtcatattgtactggttgatgaagagatagtgcgggcttgtgatacattaaagatcgacgtgaatgctgaggatatgttgctattgcggcatgttatcttggcccatcatggtttaatggaatatggttcacctgtccggccacaagttcttgaagcagaagttctgcatcaaattgatgaattagatgcaagtatcacgatgatgacccagtcattacaacatgcggaagcaggtcagtttactgaacggctcttcgcaatggatgggcggcgtttctatcgcccagtcgaagatcctaatttagatcaaccaacagaataaatgtacaaaaagaaccccgctgcgacagcagcggggttctttttgttaatgcttatttagatgatgattttgaagctttgctgttaacgccgtagcttgaaaggatgtctgataaatctttgtccttgatagatacgttagcgttcttaagtaccttagtgatgactttgttcatcactgtttggtctttaagccatgaagcgtaaacgatgtctgttaattctttcttgtgatcagccatcttacctttaccagggttcttgatcatccggataacgtggtaaccataagttgtcttaacaggggttgttgtatattcgtttgtctttaatttgaaagcagcagtcttgaatgttgagtcaagtgatgtatcagtactatcgaagacaggtaatttaccgccatctttcttcgtaccagtatcagttgaatatttcttagctaattcgttgaagttctttgttgagttgtcttttgcaagtgcatcaatgacttcttgagctgtttctttcttttcaactaagatatgttgaacttggacttttggttcgtatgatttccattgtttcttcaagtcagcattggttacttttttgttatcttttagtgctgcttgtgttaagtattgtgttttgatgctgttcttaaatgatgtaggtgtcatactgctttgtgcaagcacagagttgaatgatgaaccgtattgttttttgtaaccatcataagttttcttaacttttttatcgatggcttttgagccgtattggttttcaagcgctttttgcaagatcatttgttgcaattgttgcttgccggcagatgtttccttgatttctttatagtattcgtcttgagtgattttaccaccctttaggcttgcgatagtcttgctaccacaacctgctagtgaaactaccattaataaactggcagcggctaatagccatttcttcattgtatgacacatccttatcaaagtatttatgaataaattcgtagtgaattcaccaattaatataacacataaactaactaaattgaacgaagcgtctaaaacttcacagaactttcaaatttaggttttacgctaaaaacgcgggaatcgttgatatgcttaaccttatcgcttgcatacaatctaatttttggtgaatttatttttttaagttttgtgtcaaacgatcaactgattcttcgatttgagcaattcgtggtgctgcttcaaatgaaaatgtttgcaatgcatcactgataccaccaagtgatgtaactgcagttgttttgagttcgtttgataaattttgcgaagctgtttgcaattgaacagcactttgttgaacatcagttgaactttctgagagctcgtttaaatagcgggcaatcgcttgttgtcgtttggggccggttgtagaagcggtgagaagggcataagccgtccctaataagccaccaactagtaatccttttgaaaatgacatgattagtcctccaattgtgcgtgaataccatctgcgatcgcttgtagttggtcagcagtgtaatcagcgctattatcaccgaattgcattgcaaatgaatcatccgctgtgtaacgtggaataagatgaatatgagaatgaaaaacggattgataagccaccgcaccgttattattgcagatgttcattccttggatggctggattgctagctttaatagccttagcaatctttggaatgcgactgaaaacggccgcagctaaatcagcatcgtattcaaagatgtccgccacgtgttttttgggtaccaacaaggtatggccgggtgtcacttgtgtgatgtccaagaaggctttgacatcgtcgtcttcatagaccactgtgttcggaatttcatttcgaacgattttgcaaaagatacaatcatccattaattatgcctactttctcttatttgaagtctcaatacagcttaatgctatcataaacaagggcttttcgctactgccatcagctttgtaagcggatggaaaaatattgagtgggggcatacactcgcagtttacttcgtgttaagatatgatatgaaaaaggattcactaaaaaagtagttttaaaaaccaaaaaacgaggctattgattatgagtttagagattaaccaattaacggggggctacgcgcacgtccccgttttaaaagaggtcagctttactgtgccaaacaatcaagtggttggtttaatcggtttaaatggggccggcaaatcaacaactattaaacacatcattggattattgacaccacaaaaaggcacaattactttagacggtgtgacgttacagtcgaatcctgaccaataccgccaaaaagtagcctatgtaccagaaacgcctgtcttataccctgaattgactttaaaggagcatttagaattaacaatgatggcttatgatttaaacgttgaagagacgtgggttaaagccaatgcattgttaaaacgattccgattagacaataagttagactggttcccggttcacttttcaaaagggatgcggcaaaaagtaatgatcgtcaatgcatttatgacgaatgctgacttgtttatcatcgatgaaccttttactggattggatccattggcaattcatgatttattagaaatcattgctgaaaaaaaagcacaaggagctgcaattctaatgtcgacccatattctcgcaacggcgcaacaatatgctgattcatttgtgcttttaaatcagggtcgcgtacgaacgactggcacgcttgaagaattaaagattgaatttaacatggctgacgccgatctcgacgatatttatctgcagatgacgaaagaaggttaaccatgcaagcattatggcaaaaacgcgtgcaaaaacatattcaagaacaagtgaagtatttgcgcctcgttttcaatgatcatttcgtgattgcgattatctttttattaggagcgttgggctacacatatgctaacgccgtcaaaggactggatccacaagcttggtggctaaaacctgtattgagtttagtattacttgcggcagttagttttggccgcttagcaacattattaaaagaagcggatagtgtcttcttattgccaaaagaaagtggccttgtgacgtatttgaaatcagcacgtttatatagtagctggttaccattaattgcaatggcttttgtgacgcttctagtggcgccactcttgttaattactaagacggtcccggcatggcacatagccgttgtcttgattacattggtaatcatcaaagaccgccgcttttcaatccagttgcgtcagtggtaccaagcggatgaaacccaggcaacaaaagggctttcgttaatccttgatttggcaataattgccagtcaattatatcagtggctaaatttagtcggagtgcttgtagcgcttggactagcctattatcagcgacaacaattggcgcgtgttcaaaagacacagctattcgattggttagcggcagttggtgcagaagattctcgaatgggacgaatttaccgcctctataacctcttcacggatgtgccagggctcagtagtcaggttaagcgtcgtcgctatttagatggcttattaaagccaattacagctaaaccagccaatacttacctctatttatatgcgcgtggctttttgcggggcacagaattcagcgggttatatatccggttagttgttttagggggcatcattctgtgcttcagtcacatatggtggttgagtttggcactcggacttctattgatttatctagttggttttcaattattaccgttttacaatcagtatgatcaaattattttcactcatctatacccagtatcaacgaccaaacgaattcaagcattcagccaattaatgcggactttattattgcttcaggcgttactctttagtgtcattttattagtgacactagggatgacgattcaagttggtttaagtgttttagcattgttcgtgctcgtgattggctttgttcaattctatttgcctaaacggttgggggcatagtccctgtgacacgcatgctttcctacttgacgactactggctaattattatatgatacccttagttattagacagttgaagcaacgtgagcgctgtattttggcgctttattttattgaagaggagtcgaggctgatgaattttgacctggatactggctggcaagttcgtccggccggtggtgatacgggcgctgcatttttaggcgttcgcgcgtcagaaaagattttcctaaagcgcaacacatcaccatttttagcggcgctctcggcagaaggcataacaccacgcttaatctggacgaagcggatttcgagtggggatgtcttaaccgcacaagagtggctcaacggccgaaccttgaaacgtgatgagatgaatagcccacaagtcgctaagttattagcacgggtgcatcaatcccaactattgaaacgaatgttacaaaaagttggcggtcgtgtctggtcagcaaacgaaatgttgcaagcctatttttacgacttaccgcaagatttacggcaacacccatttttagaacaaacagctgattatttgaagcaaacgttacgtcaattacaagcaccttctgcagaggtgtgccatggcgatttaagccataagaattggttgttatcggatattaatcgactctacttagtggattgggactcggcaatgttagccgaccctgcagtcgatttcggaatgattttatttcaatatgttccacgtcaagaatggcacgagtggcttgagaactacggcctagaggtgacgcctgaattaatgatgcgcgtcaactggtacggcagtttgaacctactccaaagtattaagcaccattatcaacgtggtcgttttactgaaatgaaccgtgacatattgcgcttagaagcagtgatttctgaaataattaataaaaattaaatgccaaaggttgggcaagtgtccaacctttttgattggcatcaacaaggagaacataatgcgtttaagaaataaaccttgggcggcggacttaattgcggccaaccccagcatgattttagtgagtccggaagatatcgccggcaagtggcaaacacgttttgccaaagaacaacccatttacatcgaagtgggttcaggtaagggccaatttatcactcagatggcacaaaaatatccagaccggaactttatcgcagttgaaatccaagaatcagcgattgccgtcattttacaaaaacaagttgaattgaaattgccaaatctccaattattattgggtaacggcgcagccttaacaactttctttgctgaaaacgaagtggcaggggtgtacttaaacttctctgatccatggcctaagacgcgccatgaaaagcgccgattgacatataagtcattcttagcggaataccaacaaattatgcaaccaacgggctacttacgtttcaagactgataaccaaggtctattcgaatactcattgatgagcctgaatgattatgggatggtttttgacgacatctcactcgatttacacaatagtgaacttgcagaagacaacatccaaacggaatacgaagaaaaattcagcaagcgcggccaagtgatttacagattagaggcacactacaagtagagtgctttcaaagctggtcagcacccgagcaatagcctagtctggtgaataaccaatgcaattggttgtttgccggacgtagctatgcacagggtgctagctttgaaagcacgttttagataagagtgcacttgacgctcggtcagattttgagcactaacataggctggcgaatgagtgatataatcgctaatttgacaggtgtagttaggcgcagaaatctagcgtcaatagcacgtttcagcaagagtgtttttatcgcacgggttgcctttgaggattagcctaagaaagggattgatgggggttctttaccatcgattcctttctgtagctaaccggagaagacagtgtgataaagcacgtttcaactcaaaaaggtacgttatccagattttatctaggatagcgtacctttttaattataatattggttgaaacgtgctccgcgcggtatgttcctgcggttagcaacgtcagtcaagcgaccaataaattggtcactcgtctgactaagctaatcctcagaacgtgcccaccgcgctgtgcactctaaatttgtgagaattcaatcacgacgccggttcttgcgtctaccttgaatcgaaattggtttgtaccatcttcacgctcgcagatgatgccaccttgatagactggaaaggtccgtttgttttgtgagaataagtggggactttcttcaatccaagaacccacaatctggccttcatggtttaagccggctttaacatcttctaaaatttggtttaatttaatcattctttgttgcgcccgatattgcttcgcactggcagccgccgccagcgcaaaaccgatgccggttaataaatatttaaacgtttgcccattttttttcaaagaaaaactcctcagtcgtttttgtctttaaatagtatagcataatttttggtcctaaggagtggacatttacggacaaaccgcttatattaaaacgagtagtaaaattgaaggggtgcataatgaaagaattagcagcgatgacagatacgaatctgactcatctgattactgaagggaaacatgttttattttttacagcaacttggtgtagtgattgtcggtttattaaaccagccatgccagaaattgaagctgaattcccggaatacgactttattgaaatcgatcgggaccaatttatcgatatttgtgaagaatgggaaatctttgggattcctagctttgttgtgattgataacggtaaagaaatcggccgttttgtcaataaagatcggaaaacaaaacgcgaaattactggatttattcactcattgaactaaccttgaaggagtcattaaatgttaattgcaagtatgaaccaagcggcttttcccaacatcttagtggtaatgacccaacctgatgttgaaaagcaagtgacaactgaaaaacaatcaatcgtacggattagtgatcaggcaggtcaaaccatcggctataatttcttagcggtgaatgagttattgcccgatttacaattcaacggtgttcaaacactaactgaacagcaagttgctgttttaaatgaagcacttgtagcagctggtttcaccggtgatttagtggctgatgaaacaccacacattgtcgttggttatgtccaagaatgtgatgtgcatcctgattcagaccatatgcacgttactcaaacacagattgcacctgatcaaaccgttcaaatcgtttgtggtgctgccaatatcgcacaaggacaaaaagtaattgtggcaacagtgggtgctgtcatgccagaaggtaaaattatctggcctggtcaactccgcggtgttcaaagtgacggcatgatctgtgcagcccgtgaaatcggtgttgctggtgctcctgctaaagggattatggtcttaccagatgattgggaagtcggccgtgaagtgacagcagatgcagtcgcagccttactaaaataatccatcttacgattttgttatgggattattaaaattaaaatagtatgataatagatagcaattaattggttaaagacaaaccctttaattgttatttcattttgcagtcaattaagcagtaaaacacaaaagaggggttaaacatatgtgtgggattgtcggatttgctggtggattatttgatttaccaaagaaaaaagaagtattgaaccaacaaatggacgtcattaaacaccgtggaccaagtggtgatggtgattttatcgatgataaagtcgcattaggctttcggcgtttatcaatcattgatttagcaaagggtgatcaacccatttataatgaagaccacactaagctagtctttttcaatggtgaaatttataattatcgtgaaatgcggactgaattgatcgcacttggtcacgactttaaaacagattcagatactgaaaccattttgcatgcttacgaagaatggggtaaagaggttgttacaaaattgcgtgggatgtttgtctttgtcatctatgacttacaaactaagcaattatttggtgctcgtgatttcttcggcattaagcccctttattacacgactttagcagatgggactttcatgttcagtagtgaaattaaaactttcatgcgccatccagaatttaaaccagaactaaataagacagccttaaaatcattcatgatgaatcaatacaatgatttacaagaaacgttcttcaagggtgttttcagattcccagcaggccattatttcacttatcaagatggccaattggacatcgaaaaatattgggatatgtcatttaatccttcaaacttatctttcgaagaagaagtggctaagattgatgctgcagtcgaagaatccgttaaagcccataatgtggctgacgtaccagttggagctttcttatcagaaggggtcgacagtagttatgtcacaagtattttgcaaccgcaagaagtcttcagtgttgggtttgatgatcaaacctataatgaagtcacagcagcccgggcgcttgccgatgaattaggcttgaacttcaatgaaaccaaagtgaatgccgatgatgcgtttgctgaatttgacaaaatccaatattacttggacgaaccagatgggaacccatcatgtgtgccattatggttcttgtcacgctttgcccgtgaaaaagtaacggttgccttgtctggtgaaggggccgacgaattattcgctggctatgtcaactacggcatgcattcccacaattcaacaattaaggccttcacttctggcttgaagaaattacctaagggtgcgcgtgccagtttagccaaagccgttaagaagatgccagccttcccaggtcgcgtccatttatacacgaatttggcgaacccgcgtgaattctatacgggtcaatctgtgatttttgatatcgaaaatccaagtatttttggggcagatgaagccaatactttcttgaaacctgcttatcaaaatgatggaacgattcaagcaaactatcaagctgattttgataacgttgcggatgctgatccagtctcacaaatgcaatatatcgacttacatcacttcatgttaaacgatattttgcaaaaggctgataagatttcaatggcgcacagcttagaattacgcgtgccgttcctggatcctaaggtggctaaggccgctggtgaagtcccaactaaatacttaattaatagtcatgatacgaaatacgcttatcgtcaagcttctgctaaacatttgccaacagcttgggccaaccgtcctaagttaggtttcccagtgccaattaagcaatggttagaagatgacaagtattatgaaaaagtcaaagcactctttagcgaagatttcgttgcagaattctttgatcaagataagttattggccttgttagatgccaataaagaacaacgcattaacggccgtcggaagatctggaccatctttaccttcttaacatggtataaagtctacttccaaaatgtcgaagattatttagcattaggctagagtgtgacctatagaatccgtttaagtgcagccacaaaattaatttttgtggctgctttttttgcgttttagagatcaatcaattgataacagagaaaaataaacattcattatttagctcaaacccgcattatggtaaactataagggattagtttaatcatatagataattgtgatttattgaaaagaggacgtttaaaagatgataacaaatgacacagtttaccattttgttgggattaaaggttcaggaatgagtgctcttgcacttgttttaaacgacctaggctatcaagtacaaggctcagatatcgatcaatatacgtttacacaacgcgatttagaacgagcaggaatcaaaattctgccattctcagaaactaatttacacgaaggcttaacggtgattgccgggaatgctttccaagatgaccaaattgaaattaaaacggcccttgaaatgggcttgccagtcgttcgttatcaccaattcttaggtgaattattgaaaggctatacaagtatcggcgtggccggtgcgcatggtaaaacaagtacgagtggcttattagctcacgttttaagtggtgtggctaagacgagttacttagtcggtgacgggacaggtaaagggattaaagatgcgcaattcttcgcatttgaagcggatgaatatcgccgtcatttcctagcttattcaccagattatttaatcatgacgaatatcgactttgatcaccctgattattacacaggcttagatgatgtgtttgacgcgttccaatcagaagcttacaaagttcaaaaagggatttttgcttggggtgatgatcctgaattacggaaaatcaaagctaatgtgcccgtttattattatgggacacgcgaagacgatgacttccaagcccgcaacatccaacggacggtgcaaggttcagaattcgatgcttactatcatggcgaaaacatcggccattaccacgtcccactttacggtgaacacaatgtcttaaacagtttagccgtaattgctgtcagtcatttagaaaaaattgatggcaaagaagtggcacgcgaattggcagacttcaagggtgttaaacgccgctttacagaaaagaaagttgctgacgtgacaatcattgatgattatgcgcaccatccatcagaaattaaagccacattggatgcagcacggcaaaaatatccagacaaacaaattgtagcggttttccaaccccatacgttcacacggacaattgcgttaatggatgattttgccgctagcttaaaccttgcggatgaagtcttcttaacggatatctttagttcagtgcgtgaaaaagcagggaaggtttcaagtgctgacttaggtgcgaaaatcactaaaggtggccgcgtcttgaaattagacaatatgtcaccgctcttagacttcgaccaaccagtcgttgtcttcatgggcgctggtgatgtgcaaaaatacgaatatgcttacgaagaattattgagtaatttaagtcctaaagataattaagatttaggcattttgattgtctttctggatggatttgttacaatattcctaatcgggtgattatgggcccgtttagaaatataagaggtgaatattcatggaagaaagacgcgttgtgaatgtcgacagcgaagcccgctttttcagtaaagtgtatggtttgatggctgtcggtgtcggaatttcagcactgattgctgttttaatggtgactgtgtttaaagcacaaacttacacaatcctatcaagtggtagctcgtggatggtttggggcttgatgattgcagaattaattttagtcgttcagattagtcggcgttcaatgaagaatccaacggcctcgttagccatgtttgtggcatatgcggcgttgaacggattgacgtttacggccgttttactggtgtataacattggtgaaattggggcagctttcgcatcaagtgctttagtgttcattgccatgtcgatttatggtcgcatgacaaagaataacttaagcggctttggcaagtttgcaatgatggggttaatcggtgtgattattgtctcattggttaacttcttcatggcatcagctgcaattagctacttcttgtcatacgctatgttaattatttttatcattttaacagcatgggacaatcaaaagttaagtatgatgtaccgtcaatacggcgcaactggtgaaatttcggtttctggtttagctgttataggcgcattaaccttgtacttagactttgttaacttattcctcacaatgctccaaatttttggcggcggcagagattaagggtttgataacagtcgggatatgactgttatcaaacgtttcaaaagaacggtcatcaggtaaaactgatgggcgttctttttttatgcttgacacaatactatgcataatatagtattaactttcgaaagggtgatcggtttgaatccacaattaaagaaaggcctcttggaattttgtgtgttagcaacgcttaagaaagaggattcatatggctaccaaattatcaaagatacatcgagtgtcgttgaaatttcggactcaacattatacccaatcttgaaacggctcgaggcgcagggtgaaattgaaagttatcgggtcgaacataatggacgcttgcgtaaatatttccatttaacattggcgggacaagcatcgattgatagttttttggccgattggccggcagtgatgggcatttatacttacataagggagtgtaacaatgactaagaatcaatttattaaacagcttgcggcagaattaacgcggtatgggattagtgatgcagccaacacgattgattattacgatgaattaatcgatgatcgactggaagcgggtgaaacggaagcggagattatcgcgagtttagcaacgccagctcagattgtagcgcaattagctacaccagataaaccggttcgccaaaagaagatggcaccgatgttgattattttaatcagtatcttgttagttttagggtcaccgttatggggcacgttgttattgaccgccatcatattagtggcacttggttatttcttgatttggttaggcccgtttctgggggcaatctttgctgctgccggcattcttggtgggagtgtcagcttagttttatcgttctttgttggcttacaagaaggctggataattgcggtgatgcagcttggaattagttttgtgatggttggtgtggggctgatttgtgcaggggcgacctggtacatgacgaaatacttaattcgtttctcggttggaatcacacgctggctagttgggatgttccgtagtcgattaaaggtggtggcgtagatgttgaaaaattggttgaagattagtttatgtatgattcttgtgggaattattttaatgaccgttagttttgggatggcgggttttaaaagccaaccattccaatatcgtggcacacatgaatggagccggacgtttaacttttaagataaataaaaagaggtgcctgaagtgaaccccaaatattggacgaaactttaagcagctttctgggttgtaaaaattcgatattcaatcggacttttacaacccaaataaaagcgcgcttgtggattaatggcggcttgatggccggtgacgagactgtcgacaacggcgacatccgtgccgcgttgaattaattgatcaacggtgtgcgagccgatgtagccggcgccacctaatactaaaactgtcatcttatcattctcctcttcagttgactgattaacctaattttttagcgccatcggcaatttctgccacgtagaaacttggcgcatacccaatcttgtctgtataaactttagcaacattcgtttcaaagttgtcgacttggtctttagcaacaattgcaatcgcacaacccccaaagcccgcaccagtcatccgagcgcctaagacccctggttgttgccaagcggtttgaacgagtgtgtctaattcgatcccagtcacttcataatcaaattgcaatgacacgtgtgacgcattaactaatttgccgaaacgttcaaggtcgttgttcttcagggcttcgcgggccttcattgtccgttggttttcagaaaccgcatggcgtgcacgtttcaacaagttttcatcttgtagcatgtatgtttgtaaatcaaaggtttcgttatctaaatcgcccaatgattgaatatcattcttcgtttgtaaaatggctaaggccttttcacattcactgcgacgttcattatattttgaatcggccaattcacggcgtttattagtgttcatgataataatcacattgtcttgcaaatcaattgggactaaatcgtaatccaatgtgttcgtgtctagtaagatggcatggttggctttgcccattccaacggcaaattgatccatgatgcctgagttaacgccgataaatttattttcaaccatgacaccggttttaacaaggtcgacacggtcaatttctaaattgaattggtcttctagaatcacacccattaataattcaattgatgcggatgatgataagccagcgccgtttggaatattgccttttaaataaatatccaaaccactgtcgattgtgtaaccttgttcttgaaggtaaacaatcatcccttttggatagttcgcccagttgtgggccttttgataagataagtcgctgaggtcaaatgaaatgacacccgcatcttcaaagttcccagataataaattgattgtttggtcatcacgtttagcaacgactgcatatgtgcccaatgtgatcgcggttgggaaaacatgcccgccgttgtaatcagtatgttcaccaatcaagttaatccgacctggtgcgaagtagctcgcttccggtgctttgtggaatgcgttttcgaatgcagtatttaattctgtcatgttcatagtaaattcctcctttattaatcgctttcattttactaaacatttactaaaaaatcaatcttttttgttaactatcgctttcttttcattggttatgctaaactaagtaatagtaaacattgaattgagaggtgcaccttggcaacgatcaaagatattgctcaactcgctaacgtttcgaatgcaaccgtttcgcgggtcctaaattatgatcaaacactttcggttggcgatgagacccggcaacggattttcgaagccgccgaaagtttaaactatcgtaaaaacacgcgcaaaatgaaccagcaacgcggacgcattgcgattgtcgaatggtataccgctaaagaagaattggaagatctatactacctctccatccgacttggcgttgaaaagaaactcaaagaacttggttatgacgtaacacgcttctttcaaaacgatccatttgatacgctccatgatgctacgggtgctgtggtaattggtaagtacagccctgcgcagattaagcgcctcaaaaaactcaaccacaacctcgtcttcgtcgacatgaacacgctcgattatgaagtcagctgtgtgatgaccgacttcaaaacaccaattaaatccgtaatcaaccattttacaaccgctggcttaactaaaattggtatgttaactggtcaagagagcactgctgataatactaaattgggaccggatccccgttttattcattttaagacgttactcaaagctcaaaaaaactatcaccccgattggattttaaccggtgactttacacccgaatcaggttaccaactcatgatacaattattacaagaccaaagttccgatttaccagaagccctcttcatcgccaatgatgcaatggcagtcggcgctttacgcgccttacatgaatcaggcatcaaagtccctgaacaactcagcctgattagtttcaacgatacctcaatttgccaatacacgttccctactttaagttccgttaaagtttacactgaacaaatgggccaatcagctgccgagttattggttaaacaactcgccgctagcgaaattatcccccaagtcattacgattggcacgacgctgacactacgcaatagttcaaaataataccttcagcccaccgatgatcaattcatctcgtgggtttttatcttgtctcaaatcaattttcattaataggagtatctcttttgaaaacgaaaaaaattagacgaaccatcttaaccattgctatcttggcagtcggttatctcggtggtcgcaacaatgtcttacaaaatgtgttccctgctacagttgctactgagcaaccagctaaacaaacacccccagtcagtcctgattatcaagccatcgctgatcaagattttaaaagcggagctgcggcctatctaccaattaataacgaacaaagccaattaacagcaacggattggcaaggtgaaaaaatcgtctatgggcaactcgaccagcttaaccgaacaactagcgtcacagcttacttatcaaagcggaatctgggcaaatcagaaggccggacgcgccaaatttggaatccaacgggttggcataatcaacctctgattgtcaatggccgccgaatcacaccgcaaaatcgtggccacttgattgcttatacactcacttttaattttgatcagaatggtaactttcaagctggtcaaccaggcagtttagataatccacttaacctcgccacccaaagcgcgtacagtaatcagaaaacgatgcagatttttgaagaaaaagtccgcactgcgctcgaagcaaacaaaaaagtgatttacaaagtcacgaccgtttttcggggtaatgaactgatgccgcgcggttactgggttcaagccatttcaacagatggcacgctgaatttcaacgattacgtctggaatgttgaacctggcgtcgcattcgattacatgactggtcgttctcacttagatgctagcatgcaagtcaaagacggtcagaatattgttgaccgcaccaaacaacaagtcaaacaacttttctaaacaaaaaaaagaggtagcaaccagaataattctagttgctacctcttttgctagcttatttttccattgccttacgcaatgcagcggctaatggactttccgctggttcatcttcttggttcactttttgaatcaagcggcgttcttcatgtttagagattttcttcttacgatctttcttgtcgagcatcttttcggtcgtcccatcattaagacaccggaagtatgcgccaccttgcccttcaataatcaccattttcttgtgacattgtgggcagcggtggttggaaaccttcggatctttccgacgccgatagtgacagtttgtgcagatataaattttaccgtcacgcgtattgcgttcttttaacggatgatcacattccggacattttttattcgtcactgcaaaatcgcggtattccgtctcactctttttaatctcaccgaccaaggtcttagtggcaccctcgatttcagtgatgaacgccttcggattttcttcgcctttggcaatcgcttcaagcgactgttcccattttcctgtcagttctggtgaaaccaaggtctgattaaccaatttcaaaagttgctggccttttggcgtcactgctaaagcatgaccttgtcgttctaggagttcactacggactaatttttcgatgatttcagcacgagtggcaggcgtccccaaaccgtagtgttccatcttcccgagcaacgtcccttcagtcaatggcttaggtggcgtcgtcaattgttctttaaccgcaaaattagcgcgaactaccatcccttctcgccagtcgaccgtcgcggttggttgcccctctttatcggcagcatgccaaccttgttgcacgacttttgtttgcttaaacgtaaaggtttgatcaccaaacttaacggtggctttcgtaacagctgtcacgtatggatcagcaaataaccctaaaaagcgttctacaatcaagcgatacatgcgtagttcatccgtcgataatttttcggcacgaacgggttcttcagttggaattaaagcgtagtgatccgttactttgccatcattaaagacggctttttgtttgacctgactgccttgccccaagtattgcttagcacgtggatcaaatttgactaatgccgacaaccgttccttcaaagtcccttcgatatctgttgagagatatttcgaatccgtccgtggataactaacaactttatggatttcatacaatgattgaatcaaggataacgtctttttcgcggataaaccatactttgcgttggccacttgttggagttccgttaaatcatatggtaaaggtgctgattgcgatttctgcgttgttttgacgctgaccacttggcctttggcttgttgcaattgtgcaactaagtcgtctgccgcttggcgcgtcttaatactttgcggatttgctaattgtaaggcggcttgctgttgatcgaccgtcaagtgaattgtgtagtaggtttgcggtttaaaacgattaatttgttgtgccgtttcgttcacaaaggctaacgttggtgtctgcacccgaccagcggataaattatcttcatacttggtcgtcaatgcccgtgtcacgttcaagccaatcaaccaatccgctttgccgcgtgctaacgctgatgcgtacaaattgtcgaattgcttggctggttttaagtttgcaaaccctgctttaatggccttagtcgtttgcgatgaaatccagagccgttcaaccggcttatcgaatttaatccattccaaaatatagcgcgcaacggcttccccttcacgccccgaatcagttgcaatcaccgcacctgaaatatctttgcggttggcgaggtgactgatggcttttaattgcccacccgttttaggcaatggctttaagccgatatgtttcggaataatcggtaagtcttccaaacgccattgttgccattcttttttgatatcctctggtaattgcagcgataacaaatgcccaaacgcccaagtgatgacgtattgatcgccctcaaaataggttttagttttctgagttgttcctagaactttagcaagctctttggcaacactcggtttttcggtaatcactaattttttactcatgactggttcctcttcaattcattgatcagaatagttgctgattactagtataacccaaactgaataggaatgtaaaaaaggcccccagcaagggaaccttcttaacagttgcttattcaaaagtcagttgatacttaaattgttgcgactgtccaccactcaaaacttggttcgcttcttttgtcagcaattcttgaacttggccatattgatcaggcattcctgcaaatggctcaatgcataagaagttttccgtctgattttccaacgtccataacgccatgtatggaaaatcagtcgtcgttaatgtgatttgcgcatccgtcacggcgcttttcaagctaacctgttgactgggccgatcgaacaataataatccttgatcaaaccgggcatgttgcaattcaaaacggcctttttcaagcgctaagacttggcgtttgcctgaacgaaatggtgcaggatcaatcgcatacaaatctaattgtgcaacttgctcgccaaaatccaaataataatccgtaaattctgttccacgcgcaaggggcacgttaaaacctggatgactacctaacgcaaagctaaaatcagccgaatccagattgcagacttcatactgggagtctaggcgattttcaacgatttgataggtgactagcaattcaaaattaaatgggaataagggttgcgtttgttgattgctagttaggcgtaacgtcacactggctggtgtctgtgtgacaacttgccacacacggtcgcgtgcaaaaccgtgttgcggcatttcatacgattgaccactgattaagtaatggttatcgtttgaacgcccaattgctgggaataaaattggcgcatggcgttgccagctttcaccagaccacagataatcaatttggttttgcttattcgtgatttgtgttaattctgcgcctttttcattaatcttgactaataatgcatcagattcaattgttaacaaaatgctccccctttagatcgatattgatttaattttaatcagctcgccggtcacaccgacttgaatgccttgttcgatcttatccgttcgcgatgcgtgcactaattggaatttattttgttttacgattctgtgattatccgttaccagtggttgggtaaatggttcattgcttccagccagtaacatgacaatgactttgaaccccgcagcagtgacttgaatggggctgtaatgcaacgtatcgctatagaattccactacttgaccagcaggaatatagaataatttcgcatcctggtgtggatcaaattgttggttaggttctaaatcagcgcgtttgccaagcaccattaccacgtcagtcaatgtaatgttcacttcactaccttggtgatattcgattgctgaaaagtcactcgtatgccccgtacactcccctgcttcgattgccatccccgcgaaaacatcacggccaatagcttgcatcattgagattgcttctaactgcggattactggtgacatacacattctgatctttaaccggaatcgatgccatcgcttgtttaatggtcgttaaatcatattgcggataacaaacgccaaattgtcgaaaactaggatcatcgaccgtgagaatttgatactgcggattagccgcttgcagtgcttctaatgttgtcattgattgactcaccttcaattaggaattatgaacgtattttatcaaaccacggtgttgctgttacttttaagacttcgtttaaagccacgatattatctttaccgttggttcttaaccattgacggccagcttcatggtccttagcaaatggtgcaacactgtttttccaagttgcacggccacataaaacaccgttgaattgtgcgccggcttcatgcgcaaatttcaatgtgtcttggaaaagttctgctgaaacaccagcactcaagaagatatatggtaatgcagttgcatcactttgttccttgaagtacttcgttgcttctgccttagtataaacagcgggacgatcttcattgaagccttcaacatatgccatattaaccggaacttcgaccttcagcacgtcgatgttgtagcggtctttagagaattccttcatcatttcaatcactttgtgtggtttaactttagcgaattctgcaccttttacatcgtcgttcttagcgtcgtatgtgactaattcacagaagaatggtaaatcctctgccagacattcagaaccaatccgttcaacaaaggcttgtttcttatcattgatgctggcatcttcatccacatcatagtataaaaggaacttaacagagtctgcgccagcttcttttaagcgttttgctgaccattcactgattaaatcaggcattctacctggctcagttgaatcataacccgttttttcataagcaattaaaagcccagttccattagctgtcactttagttgctggtagcccgtattctggatcaagtaagattgatgaagaatatggtgttaattctgacgaaatcgcctttttaaattcaatcacatcttggtcggttacttcttccgtgtcagaagcactcgctaacatttttttcaatgaaccgcgttggtcaattgctaatgctgcaatgacgccatcttcatttgacattttctttaataaagctaatttatttggtgacatatttttacccatccttcatttagttaatttttaactgcgatcaaatcggttaatgctatatctaacaacataaattgtggtcttaattaaagcgtaagcgattacattctaatcgtgatagtacccttctgcccagagtttattttcacgatcaaagaagtgtggattgtcgtgttgttctggattatcaggttctaaggcatcaattttagcaattaacttgtcatcttctggtgtcccttggtatgacgcttcgatgaatgcgcggacaatttcttcacctaaatgttcgccaaccactgcgccaccaaaactaatcacattagcatctaaatgttctttagcatatctagcagccactggatcggctactaatgcagcccgaatccctttattcttatcagcggcagttgaaatcccaacaccagtaccgcaaatgactacccctaaatcagccttttgatcacggactaaatccgcaaccttcaagccaaacattgggtaatgcgttcttgtattatcatatgtcccaacatcaatcacatcatgtccttgggccttcaagaaatctgaaatcttcattttttcagctgtaacaatgtgatcatttccaatagcaattttcattatagtgacctccgattaaattaatttctccaacatatctaaacgaatctgatgacggccgcccgcgtaatcaacactcaggtattcatcaacgattgcttctgcaagtttattgccgaccaaaccagcaccgattgcgattgctttggccccattatgttcagtggtcatatgtgctgtattttcttcagttacgttagctgttaccatgccgtgtagcttgttgcttgccattgctgagccaaggccgaattcgtcaaacatgatgccgcgatctacttcaccttttaaaacagcttcactcactgaaactgctgagtctacaaaatcagcagctggcgttggtgttaaatcaaccacttctagatttttttctattagatattgtttgatatgttcctttaatccaaatcctgcttgatcagttgcaattgcgattttcatattattcactcctatttattttatttgactagcttcgtaaactgagaatactgcttgacctcctcgtttgtaattgattgatcggtaattaaaacatcaacatcatacaaactatagaagtgatagaaatcatcccgattgagcttgctagcgtctgccaaaatgaatttctgctgtgcattattcaaagcaatcccttgcgtcttgccttcttcagcactcgcattcatgattgtttcattatggatgccgttaactccaatgaacgtcttgtcgtatttcagtgtctccaacgttgcattggctaaattcccaataaaggcccctgaacgactacgataattgccacccactaggactaattcccaattattgtcgcgcgtttgaatactttcaaacactggcaaactatttgtcacaactcttagcgaattgacttgaatgtattgcgccaacaattccaaggttgttcctgaaccaatgaagattgtgtcttcttccttaacgaactgtgcccccaactttgccactttttgcttagcatcgatatgaatttctcgcttttcaatatgtgaaagttcatataacgtggggcctttgatactctgtgcaccaccatggatgcgaattagtttcccgctttggtttaattcatccaaatcacggcgaattgtcatgtcagaaacattgagcgtttccatcaatttggttgttgtcaccaaccctgaagcattaaccattctaagaattgcgaccagtcgttcacgttttagcatttcatcacctctttgttcgaaaatgtttgtttcgaacataaattatcatctacacaccaaaatgtcaagtcccccagttggttttttcactaaaatccacgtcaaaatacgcgccattcactttttctgattaccatcaatccttttagtgacccacctttaccgcacctcggtgccatttaattgcgagtttgattgcagcctaaaataaaaaacacgaccgagttgaattacccaattatcaattgtttgcaatgcattcttttaaattaatttatttttgttttaatctaaaactactacttaatgtgcccgtcacttaagttaattttgtgataaaaacggttgacagctctttagtaagcggttacactttacctgtaaacatttacaaacattatcaaacttttttactcaagtggaggtgataaaatgcagcaagatctttcaacatctttattatttcatcaagaaacaacctttatcagtgatgcgacatctcaagatgccgtttttaaggaaattgcccaaaaactttatcaacaagaattagtcacggccgattttcttgaaaacctcattagtcgagaagccaattatccgacaggcttggatttaaccgttatttctagtcattatcccaatattgcaattccacatacagaaagtgaattcgttaaaacctgtcggattgtaccggttaaattgaaccatccgattacattccataatatgatcgcaccggatgcgtcatttgaagttcgttttttgttcatgatcctaaatgatgatttaggcgatcaagctgggatcctagcgaacatcatggattttctcagccggacacctaaggatgacttaatggcattcttccaattagaatcaaccgaatcaatttatcaatttttagcaaaccattttcaaaattaattagggggtttttattatgattaaaattttagctgcttgtggtgctggtgttaactcaagtcaccaaattaagagtgctttagaaacagaaatggcagatcgtggttatgaagtgacagctgacgccgttatggttaaggacatcacagaagaaatgatgcaacattatgatatctttacaccaattgctgcaactgatttaggtttcgaaccatccattccagtgattgatgctggccctattctctatcggattcctgcaatggcagcacctgtatttgatcaagttgaagaggcaatcaaaaatctgaacaaataaagcagttcttttgctaatctaaggagatgtatctatgtctactatcatccattttgccaatgttgtgttccaaccaatcattgatcttggtgccgcaccaatgatgatgattgttctaacgttaatcgcattactcttcaaagttaaactttctaaagccttagaaggtgggattaaattagcgattgctttaactgctatcggggcagttatcggggtgttaacaacctcattccaaggcgccttaaccgaatttgttaagtcaactgggattaacctctcagcaactgacgttggttgggcaccacttgcaactatcacttggggttcaccatacaccctttacttcttattaattatggtgattgtcaacatcgtcatgttgattttgaagaagacaaacacattagatgttgatatctttgatatctggcaccttgctttcgttggcttattctcaatctactgtggcgctaacttaatcattgcaacattattagtcattttcatcggcgttcttaagattatcaactctgacttgatgaaaccaacgttcaatgatttattaaacgcaccagattcaaacccaatgacaacaacacatatgaattacatgatgaaccctgttatcatggtctttgataagatttttgacaaattattcccatggttagataaatacgattttgatgctgctaaattaaacaaaaaaatcggtttctggggtagtaaatttgcaattgggatttatttaggaattttcatcggacttctttctggacaaggaccaaaagaaatttttgccctatcatttacagcggctttctgtttggaactattctcactaatcggttcttggtttattgcagctgttgaaccactttctcaaggaattacaaattttgcgaacagtaaactccaagggcgcaaactcaatattggtttagattggccatttattgctggacgtgccgaagtttgggctgctgccaatgttttagcacccattatgttacttgaagcactcgttttaccaggcaacaaactattaccactaggtggtattattgccatgggtgttacaccagcactattagtagttactcgtggtaaggttcttagaatgattattattggagccttggaattgcctatcttcctttgggctggtacattatcagcaccttttgtcacagcaacagcgaaatctgttggtgcatttccaaaaggaatttcacaaagcgctctaatctctcatacaacgatggaaggtcctattgaaaaattcttaggctacttagttggtaacgctagccaaggagatattaaatttgttctctatgccttagcagcacttgcagcatatttgttaatcttcatctggtatgcattccaaatgaaaaaaagaaatgctgaatacgcagcaaaagatcagaaataatagttaatttcaattgaaggcggcggttacgccattaatgtaaccgctacctttttcgcatacaaaaagccctaccaaatatggtagggcttttcgttgtgtggagttgctattaatattattttttggtacatccttagtgtagcaaaacctgggcagcattccagttacaagttcagcgaattgtccggaaagtgaacaatatcactaaattgtttagtcacttttaacgattttctcaagctgcttcaaattaaaacataaccgctcatcaatcacctccggttcggtctgcagattattttcaaaccaacaatctaattggcgaatgattgcaccgccgtaaaagtcttccaagtgatttaactgttgtggcgtgtattgtgctttgtaatggcgcaatgccttatgaataatctgtttcataacctgttcaaaaaagcggcggcgttccggataatccgctagatgatataaattcaagcaaaacatgcgataccgtgtaataaattgaatggcttcatgacagccggattcccaatcgccactcactatactctcatcaactttttgaataatttgttgttcaagtgtccaccaaaataagccgcacatgcccgttggaaaatgattataaaaggtcgttcgtgataaattagccgtcttcaaaaaagtcgcgaccgtcaatttcgtcgctttttgatccattaataattcgattaaaatcattgccatatagcgcttagtcgcttgtcgtcgtgtcatttacccacccgttccgattactattttcattctaacaacaaataatcattaatagtgaaattattagcaaagattaatcttttatcatgaaaacgttatctatttactcttgactgcacaaaaaaagcggtgcgaacgtaaaagttcgcaccgcttttagtgattattatttttctaaaccttccgcaactgcttctgggtagttggctgtgacaattgcagcacaacgcgcacaaagcattgggaacttatcatctgaaccgatatcagtcttaatcatccgacaacgatcacagacgtccccctcagcatgcgcaactctgaccgcaatgccatcaaattgtgtcgcttctgttggaacatcggctgattgatccgcaattgttaattgtgagacaatcaataattgtttaacatcagcatccaatgaagctaataaagcagcattggcttcgttgggataaagtgttacggccgcttctaatgacttaccgatgaccttgtccatccgagctgtttcaagagcttttaagacatcgtcgcgaatccccatgaaggcgttccaagtttcaactaagtcttcttcaccggcaaaatgttcaacttctggcatttcagctaattgaacgaattcttctggttcgtgtaagtagctccagatttcttcagctgtgtgtggcaagattggtgtcaataacttcgtcaaggctactgctactgcatagaaaacagtttgtatgttacgacgaggtgcatcattttgaccatcgatataaacaacgtctttggcgaagtctaagtagaaggctgataattcgttcgtcaagaacatgttaattgtcttataaactgtggcaaagtcgtaagcatcatacgccgctttacagctggcgatgattgcgtttaagcgcaccaacatgaacttatcaactgaacctaattctgcgtaatcaactgtatctttagcaggatcgaaatcagttgtgttcgcaatcatgaaccgcattgtgttccggatcttccggtaagcttcaccgacttgttggaagttttccattgtgactttcacgtctgagctagcatcaactgaagcgacccagaggcgcacaatatccgcccccatttgtttgatgatcttttcaggcaagattgtgttcccaagtgatttactcatcttacgaccgttaccatctaagacaaagccttgtgaaataacagctttataagggctgacttcgccaactgcaacactggtaattaaacttgagttaaaccagccacgatattgatctgaaccttctaagattaagtccgctggataagttaagtcatcgcgagccgctaacacagcttgatgtgatgaacctgaatcaaaccagacatccatgatatctttttcttttgtaaattcaccatttggactcccaggatgtgtaaagcctgctggtaataagtctttagcatcccattcaaaccaaacgtttgaaccatgctctgcaaagagttgcgccacacgttcgattgtttctggcatgacgatttctgtgccgtcttcagcatagaagattggtaatggcacaccccatgcccgttgacgagagataacccaatcgccacgatcacgaatcatgttgtaaagacgggtctttccccattctggcatgaattcaactttttcgatttgtgctaagatttgatcgcggaacgcatcgattgaagcaaaccattgggctgttgcccggaagataacgggtttctttgtccgccagtcatgtgggtaactatgcgtgaagaagtcgagtttcaataatgaaccgttcttttcaagcgcttctgtcaccattgggttggctttatcgtaataaacgccttcaaaaccaggggcatcttcagtcataatccctttgctgtcaacgactgaaaggactggtaacttatatttagtgccagcgttataatcatcttcaccgtgacctggtgccgtatgcactaaaccagtcccagtttctaatgtcacgtggttgcctaagatcaccaatgattcacggtcatataatgggtggcgggctgtcattaattccatgtcagcacccttgaaagtcttcaagatttcaactgattcccaaccaagaagatcagtcatcttgttcaaacgttctgctgccacaacgtatttttggccgtcagctaacacttgaacgtaatcgaaagctgggttaaccgcaatccctaagttagcaggaattgtccatggggttgttgtccagatgatgaattttgtatccgcatctaataagtctttcccatccaccacgttaaacgccacgtacattgatggtgacttgatgtctttgtattcaatttcagcttccgctaaagttgattctgatgaaggtgaccagtaaacgggcttcttacctttatagatataaccttttttagccatttcaccgaagacccgaatttcttcagcttcaaaatcagctgttaaagtgatgtatgggttatcccaatcagcagaaatcccaagacgcttgaaatcttcgcgttgcttgttgacttgttccatggcatagtcgtaacaaagtttacgataatcaacgaggctcatttctttccgcttgataccttttttagccaaggcttgttcgattggcaaaccatgtgtatcccatccaggaacaaaaggtgcgcggaacccgttcattgctttgtaacgaacgataatatctttacttgttttatttaaggcgtgacccatgtggatgttgccgttcgcaaatggcgggccatcatgaagaacgaatgaaggtttaccttcatttaatttttgccgttgttgatagaggttgttatcggcccaacctttttgccaatcgatttcacgattcggtaaacctgctcgcattgggaaagctgtcttgcccaggtttaatgtttctttgatacgcatcaaatcactcctttatttttaaaaacaaaaaaagatcccgccctgaataggacgaaatcttcgtggtaccacctaaatttgaaggtcaatgaccttcctcaacatgcaataacgcgcattaagcgtcccaaattactcaattcatctggaatgaaataaggtgatacaccgctaaacagagcattaccaaccttccaccgtcgttggctcgcttaaatgatgttttgcttgctagtccttatttaaatctgttgcttggttttcaattgggttgtaagaatccgtaacagcttcaaccacttcatctgaatcggtgtcttcgactacatcggagagtacttcatcattgtcatcttcttcgactggtgtttcttcaccagggaaaataatggtttgcgttgttgtcacatcatcttcagcaatttgaccccaaggtttaacttctgcatccgagtttacttgatttgacccatggttgtcaaggtctgtcatatcaatttcagctgaaagagcttgatggtccgctaaatcatctttagctaataaatctgtccattcaggactcttaaccacttctaattgtgattcaagcataacttgtaatctttgacggaaaatccgtgtttgtttcttcaagtcatcggtttcgattgcaatttgttttgcacgttcagttgcatcgtcaatgatgtggtttgatttttcagttgcatcatccaacattgattttgcattcttttctgattcagtttgaatcatttcagcttcttttttagcgttatctttaacacggtcagccgcttcttgtgcaacaatgattgattggttcaacgcatctttcaattcattaaaatacgttactttttcatcgcttgattttaattccgcttttaaactttcattttctgttaaaactgattcgtagtctttaatcacttgatctaagaaatcattgacttgatccggattgtaaccccgcatttttgtgttaaattctttgttatgaatatctaaaggtgttaaaaccattttgaaattcctccatctttttcagcaattattttcttaaaatccccagtgtcactcgatatttttctttacgagtctgaccatcaatcgattggagttgaatccggccaaaaccacgaacagagacgatatctaatagtgctaattcaaaatctggtttatcaaatgcttgccaattcagtttaactttgttggcttgaattaattctttagcgcgttgtcgcgacagattgtaaacagttgaaatgatcgtatccaagcgaaacgagctgacagtcgtttgttcgaattgccaagcgtccttaggcgtcaacaactgtgtatagtcttgttcttgcaaatgaactgatacgcgaccaatcttagtgatttgctcttcgacatagcctgccatcttcttcgtcacaaagaattgccagcgttcttcatcggtcataatatccccaaaaacatcacggtcaatgccagcattcacaagcgtgccaagcaccttcccatgtgataggtttgcaaatttaatcgggtaccgaatctcaaataattgaatctcaaaatccgcatccgttggttcaaagtaatctggagcaatcattgcccgtttccgttcagcagcgttatatccgccattaaagtgataacggacgtcccctttttcaccgaccaaggtttgtaaaataaacgcttgacgcggatctaaaaacgccgttaagattggtcgatattcaacttgtgcttgctcaatccaatccaaaacctgcgcaacaaatggcgcctcgctttttctaaaatgttgatagacatctgcttgattgaccattgattacatccccactaataattgtgcgagtaagccgatcccacgttctactaaatataaaacgaaaaacgcagcaatggctgaaatcccaataccaccgattgcaggaatgaagcggtcaaagatttctaagaaaggttcaactaacttagcaacaaagcgccctaatttactgcccatcgcctctggaatccacgttaataaacaatagattacgacgatgccactataaatccgtaccacatacatgagcatcaagagcacataaaataaaaatagttgcacctagttcacctcaatatcaaaatcattttgatcgacaatatctgaaagattaccatcgatttcatagttcggtggcgtacataagaaaatctgatcaccaacccgttgaatttcaccgttgatggcaaaaactgcccctgttaggaaatcaacaattcgagtggcttgtgtcgcttcaattcgtgtgaagttaacaatcactgctttattttcaagtaaacttttgccgactttttttgcgtcggaataaatccgtggttcacataagacaattttattcattttagtagctcccgcagcttgcatcgagacgacgttattcgggcgaacacttggttcaccttcattagtgacagccgcagtttcttgcgtattagcatattcatcttcatctgacatgccgaaaaaattgctaagactaaacttaccagccatgagtcatcctccttagttattgcgacggcgcttgaaaaatggcggcacatcgtccccatttgggttatcttgcttattatcatccgcttgggctgtccgtttgaagatatcgaaatctttcttttcaatttcatcaaatttttcagttgcttgcgcttgctcgcgggcacttggttcgcgacgcatatcccaatctacaaatggatcattattttgttctgatggtgttgaaggcgctgttgtctttggtgctgaattgtttgttgctggacgacgtttgttgttatcttcatcaatcccagttgcaataaccgttacaacaacttcatcaccaagattttcgttgattgaagtcccgaaaatcaagttaacatcgttagttgcagcttgttgcacgataccagcagcatcttgcgcttcaaacaatgacaagtctggtccacccgtgatgtttaagaggacttgttctgcaccatcgattgaaacttccaataatggtgatgaaatagccttcttcgttgcttcagctgtccggttttcacccgttgctgaaccaatccccatcaaggcagagccttggttagccataactgttttaacatcagcaaaatccaagttgacaaaccctggtgatgtaattaagtcagaaatcccttgaaccccttgacgtaaaacattatcggcttctttgaaggcttccatcattggtgtcttcttgtcaacaatttcgagtaaccggttattagcaatgatgaccattgtatcaacatgttgctttaattcagcaatccctgaagcggcgtttttaccacgtttagggccttcaaatgtaaatggacgagtaacaacccccaccgttagtgcgccaagatctttagcaattttggcaacaacaggggcagcgccagttccggtaccgccacccatgccggctgtgacaaagatcatgtcagcgccttttaaggcttcgttgaggacttcttcactctcttcagcagctttttggccgatttcagcagttgcgccggcaccgaggccgcgagtcaacttaggtcctaattggatctttgtttcagcttttgaatcttcaagtgcttgaacgtcagtgttagccgcaataaaatgaacgcctttaacgccttcgttgatcattctgttgacagcgttaccaccagcaccaccgacgccgattactttgatgattgcgccgctattttcttgtgctgcatctaatgaatattccatctgtttttcctcctgttacgactagcccttattcaaaaaagttactaaagaaatttttcaggccttcgaatgcattttttgattgatttttaggtttggttttcttacttggtacttctttggttgttgcttgagatttcattgttgatttcgtcactgtttggtctaattcagtctgtgctacattcccaagtgcgccttggaccaaccaatcaacttccgacaagttagctatgtagttaattaaactcaacccttgggcaaatgatgggtgccgcaagcccatttgatctggaatgtataacttcactgggcaattaaagatttccttagccaagtcgacaatcccaggtaaagctgtcacgccaccggtcataatcaccccaccaggcatatcaaaagcgtgtactttatccaattcagctttcaaacgatcaaaaatctgcatcgtccgtgcttcaataatctcagctaattttttctctgtcacttgcactggtaaggcttgaccaacaacttcaattggaatttgttcttcttctgaagcagccaatgaatcagcattgccataatctcgtttagctttttcagcattttcaattgacgtgttcaagaccacggaaatatccttggtcatatggtcgccaccttcttgatcaatcgccgtaaattttaattgatgatcatgaatcacagcagctgtactttgaccaccgccaaggtcgacaacgattgccccaaaatcttgttccccgtctgataaggctagcttaccaagtgctaatgggttcactacgagttgtgatagtgttaaacccgctttttcaatacatttctttaaattatgaatcattgtcttgggtgcggtgaacaaaattccgttcatctcaagccgaacccccatcattccgcgtggatctttaatcccatcaaacccatcaaccgtaaacgattgcggtaagatattgaggatttcacgttcaggtggtaaattccgaaccaatgcggcactagcaacgtcttgcacatcttgaccagtaatttccttagattgatcagagaccgcaatcatcccttggcattcttcgatttgtagttggttggctggaattccagcaacaacccgattaatttcaatatttgctttttgttctgcttgttgtacggcttgttggatagcggtaaccgcttgatcaatgtccacaatcgtcccgcgacttaatccgtttgatctagctgatccgacgccaatcacattaagttgtttattaattgattctgcaacaattaccttaattgaagtagttccgacatcaagaccgacatatatttttgaattctccattaagtgtgtggaacctccttgcattcaattagaataaaatgattcctatgctaaatagtaccatatttcgactagatttagaaagccaatccaatctttttaaacagtgttaactaattttttattgaatcagcctcagaattatcaaataatttggcgtaagcgccaacttctaagtcaattcgtcccttaccgtccatttgtttcgccagtgtgggataatatttaattttcttggcaagtgtccgcaaatccccaacaacctcattaccatcattcatatataagtgaacttgataaggattattgttcttagctgttaaacgaatttccgacacagcactttgaatgctgtttggaaaagcttgatatagttttaacccttgctttaagaaggcgtcatttttaaattgactatagacagggctattgccgagagactgcgtcattttcgtctttaaaatcgtgccattttctaagattggataatattgtttatgccgcactagatagcccaccgtaggatattccttaatcgccaatgtcagttgattaaactgatcaactttgacatttacgcttttcaccttaggtagtttctggtgaatccgcttctcaatcgctttttcctgccagatttgtgtcaggacgttatcgccaatccgtacgccactcgcattaatcacctgttgatcaggcactgatttagtcccgttgaccgtcatttgttgaacgtcgctaatcggcaacataaaatagattgccacacaagcgcccaatgtgaaggtgctcaataacgctgtcaaccgccactttgtctttgccgttcgttgcgcttttagatgtggtagttgaccactaattgttggtcgcccaggcgttaatcgttgccgacgttgtttcttccaacgctttagttgataagcgcgccaaacgtttagtaattggagcggatcgagcgacccatttttagttgtttttttcttcaagtcatccgcccccttcttaacttagatgatagtattaatcacttcaataatgcgatctgaagcgtctggaatccccattttcttagctgctttagccatggcttgttgactatcaggggttgcaaaaagcgtatctaatgattggactaatttgtcacccgttaattgtgcttctggaattaaaatcgctgcgtcttctttaaccaaactctcggcattttttgtttgatgatcatttgttacataggggcttggaatcaaaattgacggaatcccaagtgctgtgatttccgccaaactcgtcgcaccagcacgaccaacaatggcctttaaatctggtaaaatttcgggcatgtcgttgatatatggtacaacagccaaattatcattgagcgtcatcgcctttaattgcgcttgaacgtcatcaaaatgaacccgtccagaaacgaatagcacctgatactcttttgtattaagtgctggtactgcatcgataaaagcttggttaatacttggtgcaccacggctcccaccaaacacaagcactgtcggactgtcagtcttaagcccgaattcacttaaacgttcgtttggtaacattccagcaacttgttgggcccgcggattgcctgttaatacaattttgtgcattgggaattggtcgctgactgattcaaaggaaatggcaactttatcgacaaagcgcgccaaaaagcggttggtaaccccggctgctgagttttgttcatgaatcaacgttggcacttttaagcgacttgctgcatacagcaatgccccagaaacatagccacccgttccaatcacaatatcaggtttgaatgttttaatcatttcttttgcctctttaacactgcgcaagaaaagttgaattgttttaatatttgttttaatgcccttcatattcatcgaacgtttaaatccttggatttctaacgtcttaaaatcgatgccttgatctggcacaattttactttccaaaccgcgtttagtcccaacatataaaacggcatccaacaagtcgcgttgttgcattctttcaattagggctaacgctggatagatgtggccaccagttccgccaccagatatcattactctcattttagaatctccaatttaatctgtaatttgttcgactgccttaataaagacgtccccacgttcttcaaacgtcttgaactgatcccagctcgcacatgcaggcgacaataaaaccacgtcgccggcttcactagcagcataagcttcaggcactgcttctgttaaattatcaactattttgatgacgggaatacctgcttcgcgtgctgtctgtgccaataattgtttggtttcaccatataagatgattgcttttacgtgttcttttagtagtggtaataatggttcgaaagtaaagccccggtcaagaccacccgctaataaaacaattggttgtttaaaactcttcaacgcgacttcggtagcttccatattggttgctttagagtcgttatagaagcggcgaccttcatagctcgtcacaaactgcatccggtgtttaacgccggtaaaggtcgttaaaacatcaatgatcgcatcgtttgattggcccatcagcttagccgccgcaattgcggccaaagcattttcaatattgtggtcaccaggaacgttaatatcagtcactggcattatcacttcacccttaaaacaaagttggccatctttgacataggcgccagcttcagagttgcctagccgtgaaaatggcacaacttgcgccttagtttggcgactcaattcacgtagttcaggtaagtcccagttgacaacaaaaaagtcgtcagccgtttggttttgaacaagtcgcattttcgcagccacgtaattcgcacgcgagccatgataatccaaatgtgcttcataaatattcgttaaaactgcaatcttaggtttaacggttgttgtaccgagtagttggaaacttgataattctgtgaccatcacatcggcagccgtcactttttgggcgaccgcacttagtggaatgccgatattgcccgcagcgtatgcgtgcccctgggtgcgattttcatctaacatcaacgtaattaacgttgtggtagtcgtcttcccgtttgaaccagtcacactgacccattgggcttcagacacttcgtatgcaagttctggttccgttaaaactggaatcttgcgcgcaatcgcttctgccaccattgggttatcgtaacgaatgcccggatttttgaagaggtatgcaaagttgcgctcaaataacgccaatggatgcgatccagtaatgacggttgcccctaattcacgcaattgtgcaacttgaggattgtcttcttgttcctttccgtcattgacggtcacaatcgcccctaattttaataacaatttagcagcattaaagccgctcttccctaatcccaaaactaaaactgcctgatcttgatacgtcgtgctggccttcattaaattcgccctcttctaaaaaattaacagataaattgctgaacagatgatactaaataaccaaaagctgatatcaatccgccattcactccaccctgacatttcgaagtgatgatgaatgggactcattttaaaaatccgcttatggaataacttaaatgaaccgacttgtaacatcacacttgctgtttcaatgacgtatactaacccgaccaatagcagtgagaactctcgatgtaataaaattgacatggctgctagtgcgccaccaagtgctagtgaaccaacatcacccatgaaaatttgcgctggttttttattgtagattaaaaagccaagcaatccgccaataatgctgaggccgaaaatggcgacatcaatttggttttgatgaaaggcgataattgtataagttgcaaatgagatggttgccaagccagcaactaacccatcaatgccatccgttaagttcaccgcatttgagaaaccgactaaccacactaagacgaatatacaaaagaaccagttacttgaaatagtgccaattactgggatttcaagtgcagtactgaagccttcatggaaataaacagcgatgaagacaatcccaccaataatttgccctaacaatttttgccaagcgcgtaagcctaagttctgtttacggaaaactttaataaaatcatctgaaaaaccgagaataccgtataacaccagaataaacatggcaattaatagactattcgttaactgttttaagaataatcctacccaaatacttgaaacaacagcggcaataatgaataagagcccgcccattgttggtgtcccatttttcttagcgtgccatttggggccttcttcacggattgtctgcccctcttttttaaagcgtaaatacccgataaaaagcggcataaaaatcaccgtaattacaaacccactcattaagggcactaaaaattgtcctgctgccatttcataaactcctttaatccaactatcttattttaattgtacttttatttttttaaccccatctagcaacccattgaccgctaggctttgatgataagcatatccgctacctttgatgtcaatctcaacacctgttaattgcgcgagcttcaagaggtcatttttcgaccaacccgtgacatctggcatcgtcattgccccattggtcattaaaatgactcgctgtttaggtaaaatcacactattggcctttggtaattgctggacgactaagttcccactaccaacagaagcggtttgtaggcctaaatccgttaatttcttttgtgcttcatccgttgattgaccaatcacagacggaactgttacttgttgttgtgtgtctttttcagcctttttggtatactccagtgcccgtttcatcattggattgaagacctgtgccaaaatactttcagcactatctgtcatattctgcggctgtttcattgtgatatataaaatatacttaggatcatcagctggtgcaatccctgatacagagaagatataattgcttgcgccggttaaatagccaccgtctggaccagtaatttgtgcggtcccggttttaacggctactttataatctggaatttggtaaacctgacccgtcccataatcttgataaacaacatcttccatattttgtaagacagatttggccgtgctagccttaattggtttaccagctttgattggttttacttgatgatcctgattaatcccagataaaatctgcggtttaatcattgtgccatcgttcgcaatcgcacttgtcatctgaagcatctgcattacattaacgttaatcccttgaccaaatgaagttgtggcctgatctagtggccgaacatattgcaatgtcccctctgtttcgccgggtaattgaataccagttggttttaagaagccaaacttctgaatgtagtctttccaaaccttaggacccatggcttgttcaagcttgaccatcccaacgttacttgatcgtgcaaaggcttgactcagcggaatcatcccccagccactcgtttgccaatcgctaattttcttatcgccaactccaatcgaaccggattgataatactgattaagattgtaattaccagagtcgatggcagctgccaaggttgcaattttcaaaacagagcctggttcatagccatcttcaactaatgtatctcgccaaatcttgccaattccctttttagtgctggcattaaaggttggtcgttgtgaagccgccaaaatttcacccgttttagcattcatcaagacggcattcatactcttaggcttatattttttattgacactcgttaataaagtttccatgtatgattgtaaccgagaatctaaggtcaagtaaatatcttggccgtttttagcggcttttactttgtttttcttttgattgatcgtgtatccataggaatcacgggcaaaattcttgtaaccatcttggcctgctaattgtttgttgaagtatttttcaattcccattacaccaacgaggctttgatcagcgccgtcttcgtcctttggtgattgagcgataccaatgacgtgagatgcgaatgttccattagggtacagccgcgtaggggactcattgaagtaaataccggttaaatgttctttttcaatcttccgtttgatgctcagtgaaaggttttggccggcacttccgaattcaacttgataaactgaacggttagctggcgttaattgtttatagattttttcttcactcaatggtagatagcgactcaaaactttcgctgtttttttcttatcagttacatataacggcttcttattaggaccaacgtaatcgtgacttaataccgcatacactgaataggcgttaatgtcttgtgccaaaacgttccctaaagaatcataaattgtaccgcgttgtgcgcgaatcacggaatcagctttgtattttttctgtgattgtttcgttaaatccacccctgcaatatgcccagtagcagcaatgtaagcaaaacgaccggcgaaaactagaaaaatcgccgcgataattagcaataaaagcctgccaaaaacgcgtcgattccgccgtggactcttacgtgtcttaactgatttcatttagacacgttccgaatattattttcatttagtttaagatcatgtttctgggcaaaagcattcagacggtcagagcttgttaattcaccgatctcctgttttaaatcattattgttagcgctgacttgggccatcttttgagtcgtactttctaatcctcgttgtgcattaacaactgcaattttggtggttaacaaactaaccaacatcgcgaaaaagataattccaataactgacgtcgctaatttttcaacagctgaaaaagccacttttttagactggcttgcaactgcttgtttgtgtgcagtaggctgcgtttttagcggtgctactggcgtttctaattggcgtgccgtgttagttgccatcatcatcaatccttctagtcaatttctttttgtttttctgcgacacgtagcttagcgctatgtgcacgatggttttcttctaattcatcatctgttggtagaatcggcttgcggttcactaattttagaaccgttttttgttcttctggtaaaattggtaaccctttcggtaaatctgggagcgttgcttgctccttaaacatcgtcttcaccaaacgatcttctaatgattggaacgtaatgacactgatccgcccgccgacattgaccaatggaatagcttgttcgagtgaatcttcaattgcccctaattcatcattgaccgcaatccgaatcgcttggaaaatccgcttcgctggatgtccaccctttcgtcttgctggtgcaggaattgcttctttaatcaaatcagctaattcgattgtcgtttcaatcggcgcaactgctctttgttgttcaatcttccgcgcaacttgttttgagaacttttcttcgccgtagcggaaaaagatcttaattagttgttgataggtccactcattaacgacattgtaggcactgagttccgccccttggtccattcgcatatcaagtggggcttctttcttataactaaacccgcgttgggcatcatcaaattgtggtgatgatacgcctaaatcgtataaaataccatcaatcttagtcacaccgtgttctgctaacgctgcttttaaatagcggaagttactcttaataaaagtcacttggcccgcttcagcatatttggctaatcgttgtttactacttgctaaggcatgatcgtcttggtcaaacgaataaagatgaccggtcgtcagctgagataacaaatattcactatggccgccgccccctaatgttgcgtctacatacacgccatcgggttgcacattcaaggcatcaaccgtttctttcaataaaacactttgatgtttaaatgtttctgtcatctatttaccatccttctaaaaatcaaaatctaacatattttctgcaatatcatcaaaattctcttcagcttcttcgctaaagctcgcccatttttcctggctccaaatttcaatgcggtttgagaccccgattaacacacattctttttcaagaccagcatgtttagcaagtgtgtctgggatattcacccgaccttgcttatcaggggaacattcgaccgccgctgagtagaaaaagcggacgaacgcgcgggcatcttttttagcgaggggcagtttttttaacttctcttccaactgttcccattcactaagggggtaaccaaaaatacaattgtccatgccacgggtgagtacaaattccgcacctaatgattcacgaaatttagccggcatgattaaccgacctttcgtatcaatcgtgtgatgaaattcgcccatgaacataaccattcacccctttgcccaccttaactgattttagtctaccacaatcccccactttctaccacattttgccaaaaaaaaccaaaatcttatcattttggaaccaattgtacacgatatttatattactagcctttttgaccaaaaaaaacagccatttcgttaaccgaaatggccgtttcacttgttaattaagtaagcttattttgggctgtcgcaccacttctaagcaacgccgcaaaaaattgctcactttaatctaatttttagaagtttaaaatgccagttgcagcgagtgaaccaaaaatgactgagcccactgtggcgattaacattacccaaacgaaaattttagtaatgcgactaaacgtgcttgtttgtttcttcaattattccaccacctagacttttttcttatcagcagtttacaccgaatcacttgaaagtgcaactcagtcctttttatcttttccaaaagacggtacaatgggactattaactttcgaggtgatttaaatgccatttagcacaacacttttctttgcaggcttaccgcccgtctgtgtcgcactcggctactgtatcgaccggttgactcagcgtctatttaaacatcgttttcattatattaattggctaccaattccattgctagtaagtgctatctttctgagtatgccaattttcagtaaagctggctggttcttttgcttagctatctgtctgtggggaatcatctggagcttaacgcgcttttactacgaccgtgcgctgtacctacgtaagtttctacggagttggtggcgctttgtcctcgtgatggccacagcatggtacctatcctttctaatcatcacactcctttaaaccaaaaaagcggtgtcgactctttcaatttgtcgacaccgcttttcttagtttaaaaaatatttccctaacgcgcttaattgcgtaattgtgattgtcggttgcaccatgattggcaatcgatcaacatcgaaataggccgtcgccacatgggcgttaatccctgcttcaatatctaatgcacgatcaccaatcatcacggttttagttttatccagctgataacgatcacataaatcgttcaaactatctggcgccggtttcctggcaaatccgctctgactcgtaacaatttcagtaaaataatccgctagtccatgcgctgccaaaaatttttctgcagcatcatcacgatgggtcaataagaaattctgaccatgtgcactaatctgtttcaaaatcgccgctgcccccggataaggttgtggcgtctgttgtaattggtgttctaattcatgatattctcgatccaattgttcaaatgaaacattagtttgctgagcaagcatctgcagttcccgtttaattgaagtctgcttaatcgcttggtataagtgcgattgatcgactgcgacttgatgatcacggtaaacctgactgagcgccgtcatcataacaggataagtatcatacaatgtaccatcgaaatcccaaatcgcattttgataactcattaattatccattctcctttgtatcaaataggatagtgactggaccgtcattgaccaaagctacctgcatatcggctccaaattctccagttgcgacgcgaatcccagtcgctgctaatttttgattaaactgttcgtataagcgtttagcatagtccggtttcccagccgcagtaaagcttgggcgattgcccttcttagtgctagcaaaaagggtgaattgtgacaccgataaaatggcaccgtcaacctgggccaacgccaaattcatcttgccatctgggtcttcaaaaacgcgcaattgactaattttcttaaccaagtaatctaaatcagcttcagtatcatcatcacaaataccgaccaataacaaaaagccttggttaatcttgccaacaatcgtctgatcaatcgtgacacttgcttggctcactcgctgtaatactactcgcatattaagtcgctcctatccttgaacccgtttgacttcgtaaacatctgggatgttcttcacggcttccataatcgtttctaaatgatctgtattgcgaatgccgactgtcacatgaatatccgccatcttatcgtgatcaatccgccccatcacgttatttagctgtttcgtatgtgcatttaaggactgtaagacatcgttcaatagtccaccacggttatagccgtagatttccaaattcgcatcatagagttgatcattcttagcgttggtattttcccaactgacttcagtcaatcgactgttcatatctgcccgatcaacgatattcggacaatcgcgccgatgaacagaaaccccacgtccctttgttacatagccaacgatatcatcaccagggactggattacagcatttactcaagtgcactaagacattgtcgacaccttcaataacaacaccgtcttcatgtttgattgtgatatggctaccatttgctttaggccctggttgttgtgaatccttcgctgatagaatctcagcttctaatgctttttgttcactttcttcttttgcccgtcgttctttaatcgttaagcgattgacgactgactgtggtgagatttcaccgaacccaattgctgcaaacagttcttcttcggcattaaaattaaaatgtggtaggatgacagctatctcggctttagtgaggtgttcttttggtgtataaccatcttctaccaacagatgttcaacagccgtccgtcctttttcgacgttttcatcccgatcttcttttttaaagtagcgcttaaccttattccgagcacgcgcggtgaaagcgagcttaatccaatcacgacttggtgtcgcacttgttgacgtcaacatctcgacaatatcaccattacgtaattgatagttcaacggtacaattttgccgttaatcttagctccaacagcgtggttcccgacttcagtatgcactaaataagcaaaatccagtggcactgaaccctttggtagttcataaacatcgcctctgggtgtgaaaacataaacgcgatcgctaaagatatcgcctttgacgctttccataaattctgcagcatcatcggaagcatcttgaatttcaagaatttcacggaataaatcgagtttacgccctgattcatccagcttaatctgttccttaacgccttctttatacgcccaatgtgcagcgaccccatattcagcaacatcgtgcatttcttgcgtccgaatttgcacttcaagcggtttgcctttgggaccaatcacagttgtatggatcgattgatacatgttggcctttggcattgcaatgtagtctttaaaccgaccgggcatcggtttccacttagtatggattgctcctaaaacagcatagcagtccttgattgagtcaacaacaacccgaattgcgagtaaatcatacaattcttcaaattgtttatgctggtcgcgcatcttgcgataaatcgagtaaagatgctttggtcgtccataaatgtcgtaattcatatctaaatcagcaattgagtctttaatgtcttcaattgcttcttgaatataagattcgcgttgtgtccgcttagaattcatcaggtgcacaatccgatagtactgttgtgggttcaaataacggagcgaaatatcttccaattcccacttaatcttactaatccctaaccggtcagccaatggtgcatagatttctaatgtttcgttagcaattcggcgttgtttttcgggtttcaaatgtttcaacgtccgcatattatgcaagcgatcggcgagtttgaccataatcacccgcaagtctttagccattgctaataacatcttccggtgattttcagccagttgttcttggtgtgatttatatttaatttttcctaatttcgtgacaccatcaacgattaccgcaacatctttgccaaacatctcttcaacatcacctaacgtgatattcgtatcttcgacaacatcgtgtaagtaaccagaagcaaccgttgcgggatccatcttcaattcagcaagaatccctgcaacttgaattggatgaataatatacggttcacctgattggcgaacttgttctttatgcacataagctgcaaaatcatacgctttttggacaaaagcaagatgctcagtattcatgtatttctgacataactgtagcacttcctgctgtgaaattactttttcttctggcatcctgcctcactccaattcctcttactcgattaaaaatgtactgaatacaacaaaactgactcaactaattaactgtcgagtcagtttgcttaacggcgttcatacgcagtattaattcctaagtaacttaataaacaataaataggaacgaaccaatagttataatctgcgtagcgcacaaccaccatcaatccaaataaaatcggcaggtacaaaatgtgataccaagctgcatgggtcttttgaacacgatacccaatcataaaggctgcgcaaccattgacagccatgaatagcagtccaatccgccacgttttatcgatgtgcaagacaccaaacactagcggtaaaacgaccgccaagagaatggccactaataaatagcgtacccaatccatttttaaataacgattattcataaatttagtcatgttgtgcccctctgtaaaaagattacatctatcatactataaagtagccaattctgtcacatacgaaatcgcacttaacagatataacggcgcggtctcggcccgtaaaatccgtggtcctaaaccagccatcttaaagccagccgccgcaagcatctcaatttccttgggcgcaacgccgccttctggaccaaaaacacaaagtaatcgatccccaggttgggctgtttgtaagctctgaactaattgggcatgctcaccgtctttagctgactcttcgtaagccactaatttaatcgtcgctgattcttgtgcgaccgccgttaaactgttgcgccattcaatagttggtacatgcgtccggtgagcttgttcggctgcttcttgcgcaattttttgaagccgcgcaactttcttagcttgttttttatcatcccagcgtgcgactgagaattggctattacagaaaataaaccggtgtgcacccaactgcgtgcctttttgaacaatccagtctgttttgtcaccctttgacaagccgcatacaatcgtcgtctcaatcggtaattcaactgattttgtaattggcgattgcaccgtaacggtgactgttttgtcagttgcatccagttcagttaattcaccgatgaatgcttgttcatccggcgttaccaattcaacacgatgaccaggctgcatccgcatcacttttagcatatgatgtgcagtttcacccgttaaggtcacttgttgttctacttgaattgcttcatcaataaaataacgttgcatgccatactcctcttaatcgtcgtccgtcttttggcgtgtaatcaatgccacccagtcacccatatgaagggcttcttgaacaacaaaatcattcgccgataacgtttcacggacaagtgcttctttatctgcaataatgccggccagtaataggtgtccattgtcattcaataaagccttggcttggggaatcaagggcacgataatctctgctaagatattggccacaatcacatccgctttcgttgtaatcccgttcaacaaatcgttgggatgggcatcaatgccagcagtcactgggttgagggcaaaattttccttagcggcatcaaccgcaacttgatccacatcataggcgcgaatatcattgacccctaaatgcgcagccgcaatactcaaaaccccagagccagtcccgacgtcaattaaagattcaccgccgcgtagaaccatttctaacatttgcacggatagatgggttgttggatgcgttcctgttccaaaagccatccccgggtccatccgaatcagtgcttcgcgttcatcagtcggttgatagtcggtccaacttggcacaaccgttaagaagcgagttagccgcgttggttgataatatttcttccaagctgtcgcccaatcatcatcggcgacttgtgccaatgtcaccttaccagaaccaatcgctaacccaaagtcagtcaattgggcaacgcgttgttcaatcaacggtaatttttccggcacaaaaactgtttctgggaaaaaggcactcactgcagcacccgtttcaaggtggggaatactgtctagatcaataatttgatctggctttgcctttaaatgttcataatcagctgcgtcttcgatttggattccttccgcaccattttccgttaaaatattggcgattgcttccactgcttcattaacagtagcgaccgttacttttgtccattccatgtagcatgtctccttcttaatgcgggttgcttagtatttagggtaagcgtagtattttttcgctaattgatcatctgcttgagcgacagttgcttggaaaacagtgtcatcccagtttaagataaaggtttcttcgtctgattcatcattcacaaaagcggctaattgatcttcgccttcatctaataagtcttgtaaatagttgaaaaagccccgaccgacttgtgcgtttaaccccttgcgaccagcaaatggaatcactgctaaataattgtctgcatattcaaagccgtccatcttactttcatcgaagaataaaatcgcatcttcataactgatttcatccgattcgttcaattcaccattttgatcttcaacggcaattgcttgttccttagtcacgtttaatgtgaattccaattcaatcgcccgagcttgtttgtcccagttgatattcatatccccactaaattgtaaatcatctaattctgcatcgaaaaatgctaacatatccatttcagccactgtattcaccatatccttttaattagtcgttatttaagtcaattttaaagttgaacgtattaacatcatacctgattatgacttgaatctaaagcaatcattcaaaaaagcccagaacaaaatgtcccagactttcaatcgtaattctacttaatgtgctgcttggttctgaccccaataaataacgtccatactctgatcgtcataacgttggaactcaattccgagtgctgcatcagattctgccatcacacgaccatatagccgcatatcagcttctggcgtgttgccatctgggcgaatggcatgcatcaacataaacttagccatttctgattgtagatgggcttcaatcggggccaacggatcaaaaaccatcgtgacaaaccgaatatcactactatcgccatcaccaattaattcaacaatcggaaacccaccaaaattttgttgttgttttaaataagccaataactggtcaatctgttcttttgtgaaggctgatttataaaagaggaaatgccaagtttgtcgtttcatcgtgtcacccacccgttatttattacatatagtatgccatactgtcaccaacaacgcgaacttagtctttttttggtaattgattcgattttggttggtgatatgcctttttcaagccagcaaatgtcgcttgaatcttttggtaatgcatttcatcgttacgcgcatgcttcaccaactgggtaaaatcgtgggactgtaagtccttttctgtttgttttttaaaccacaacatatcatcactccttatgtaattttattatacaacgaaacgttatcattgcagtcttaaatttacttttaaaccaaattgccgtaaactaacactattcattaaaggagtctattatgggaaagaagaaaaagcaaaacgcattatccaaaacattagttgaaaaaattctagataaacaaaaagtggcctacacccaacttgaattcccaacagaggaagtccacaacgttgcccaaatgaaggtcgatcatctcgatatcgatgaacatcttatttataaaacattggtgctctctggtaagagtaccggcccaatcgtcggtgtcgtcccgattgattgtcatttagacgaaaaaaaattaagccaaatttctggcaacaaaaaaattgcgatggtcccattaagggagctcgtggccactactggctacgaacatggcgctaacacgcccgttggaatctgggaacaatcccactatccgatttacattgaccaacaggctgaaaaggaaccattcatctatgtctcatccggtaaaattggccgctcaattcagattaatccgcaagacttacagcgggtcactgaagccacctttgctgacatcagtgaagcctaaaaatatgataagaggggctagaacaattcacttgttctagcccctcttatttttgagtttaatctaagtattgggccaaattagcaccagaaatgatgacttgttccttcagcaaatttggttctttaataatattatgaaccaccgtttcgggtaaaacatcattttgtgcgagcatttgcagagcatcatcttgcatcacgacttttttaaccatattatgtattttaatcgttgcaacatatttttgcgattcccgttcttcaaccacttcgtagttgccgtaataatgtttatctgtcattaactcatccccttaaggttaataatatcatatttcaacaaataaaactaagtaacttatcctataataaggggaaactgttaaaaaataccaaaaaaaaagcaaaacaataactgttttgctttttccattatagtaaggagagtacaggatttgaacctgcgcgccggtataagccggttcgacggatttcgagtccgttgcattaccactctgccaactctccagaacgttattcattataacagacttctaaagaactgaacagcgtaaaacacaaaaaaacctacgtgcgcccacattctattcgatcaccaccatcccatcttgatcaaattgccagtcctttgagtaagcgacttcccaatagtaaccatcgggatcactgaaataaccactatagccaccccactcgccccattctggcgctttgatgagcgtggccccgttagcgagagctgttttaaatgttgcatcgacttccgcttgactatgcgtattaaaggcatggatcacgccgttgaacgttcttggaaatggatgattatctgcggataagccaatatcggctagtagtgcagtgtacggaaacaattccaacttggtcccagtattattgaaaaagacgattgtctcagcattttctaaattcggcgcttgaaagccgagtgcttggtaaaactgacgtgacacggttaaatcctgaacacctaaacaaattaaatggatactattcatcaaatcacctactcgttttaaattaacctgattgtatcaatccgaagctaataacgcaattttccccgttaattgaccaattattaaatttattgaatcatatttctttttataaaaaaattcgttatacttaaagaatcttaaatgatagaggtttattaatatgaagatttcttatcgcaaactaccgtttttattcaacttaattttcttagttgtaacggttttacaatctttgatcattctagtggttaacccccacgttacgaaattcatccccacttatatggatgccatggcgaaagtatggtggttgtgcattattgctattattttgcatattgttgcttatttattatcactcgatcagaatttgattttactggcatacttatgtgcaatcgtcgcttacatcatcttgattttagtccctaatttattactagttgcccttttcttgttagtggttagcttgatcatttcatttaaagtctatcatttccattatcgaacacctgcttagtcctcgtcggagggctatttttttatgcgctaacccatttaatttatggtataattagtttgaaattaagacaaaagaggttctagtaatgaaacgactaactgcgattctatctttattggtactttgtttactgccttttgtaagcccttacttcttcggcaaaggcatgcgcttttctagtaatcatcaaaaaaatccaatccgctttgaagtttgtcggcatccaaaggtccaccacgcagtcgatcgtgatggcagtgaacaaaaattaaacgccttcaaccaccgctgcgaacggttctttaatcaactcacacttgcgcctgaagcattctacgccgtagctggatttcttggatttaccgtctttattctattattagaaccactacttgcactcctaatgaccctcaagaaagtgccacaacccaaaaaggcacaatcccatactccgcagaagcatcagattgcgccttataagtggcatttattagattagtttaagttcaacttttgataagtataatggccctcttttagtgattgattcgcatatggcgtctcattgagcaacgccacatattcttgggcccgttgttccgaactaaacgcccggatcattttacttttatcataataaagtgggtttgcttgatataaaacaacgtagatccattgattcatctgtcatcacctaactttgtaatccacataaagaaagaccaactcgtaatgagtcggccttttttaatgtcatcttaacgacgagcttctttgatacgagctgccttaccacgtaatgcgcgtaagtagtataacttagcacgacgtacacggccatgacgagtaacttcgatttgagcaacacgtggtgagtgtaatgggaaagttctttccacacccacaccgctactgattttacgaactgtgtaagtttcactcacgccaacaccatgacgtttgataacaacaccttcgaataattggatacgttcgcgagtaccttcgacaacacgcacgtgaacacgtacgttgtccccaggacggaagtcaggaatatctgaacgtaattgagacttagtaatttcttgaattaatggattcattttgaatctctcctttttccacagatattcattaacgtcttgcgccagcggaataccgttgttttgtgactaatcatcacaatttttaattttagcataattcaactgagaataaaagccttatttttcagccgcttcttgcttaatttcttgtaaccagtgcaactgatccttggtcaacgtcatcttctctagtaagtccggacgccgttcatatgtccgtttcaaggacatcttctcgcgccactcgttaatgagcttatgattcccgttcatcaagacttcaggtacctttaaaccgcggtattccggtggtcgcgtatattgtggatgttccaataagccggtcgaaaaagaatccgtaaccgctgattgttcattccccaagacgccaggtacaagccgcgaaatggcatcgatcatcaccattgcgcctaattcgcctccagtgacgacgaaatcgcccaatgagacttcatcagtgactagcgtgcgaatccgttcatcatagccttcgtaatgcccacagataaaaaccaagtggtcttcttgagcaaattcttcggcaactttttggttaaacgttaccccagctggatcgagcaaaataacccgtttgtgccccggattcttggcattcacttgatccatcgcctcaaaaatcggttgtggtcggagcaacatccccgcacctccaccatacggcgcatcatcaaccgaattgtgtttattgactgaaaaatcacggaaatccgtcacttctaaatcaattaagtcacgatcaattgccttaccgataattgattgggataacccattttgaaccatatctggaaataaacttaagacatcaatcttcattatcaatcaatccttctggtacttcaacgtaggctttacccgcttcaatatcaattttcttaacgactgacttcaaaaatggtaagagtaagtctgaacggccacggcgcttgattacccagacatcgttgggacctggatcgatgatttctgagactttcccatagctggtcccatcggcttcttcaaccacttctaagccgataatatcaccgtagtaaaactcatcatcttccagatcatcttcacgttgacttgcagcaatctttaaattatgacccttgaactgttcaacatcgttgatattgcccattccttcgaactgtaatagatagaattgcttgtgttggcgcattgccgccactttaacatcaacaaggccattgggcatttcgacggccagttgcacgccttttttaaatcgtgaatccgtaaagtcagtcgtcgcaatgacccgcacttcaccacggatgccgtgggtattgacaattttaccaacttgatagtatttttctggcatttaatttctccttaatcgacaaaaaacgcctaaataaaacatctctgcttcatttaaacgtttttgttaggcatctacaatatttaaacggatccgtttttggtatggtgctttcacactatagacaatggtacggatggactgtgcaacccgtccctgcttgccaatgacgcgaccgatatcacttggattaacctgtaagtcaaattccataaaacgttctgtctcatgttcagtcaatttgacgtcttccggatgttcgacaagtggctgaacaattgcaataattagttccttcacgtctgtcataacgaatccctactttttagcgaagcgtgcttcgtgatatttttgcataatcccttgttttgataaaagattacgaacagtatcagaaggttgtgcgcctttttgtaaccaatccatgataacttcttcttctaacttcaagtcaactggttctgttaatggattgtagtaacctacttgttggataaagcgaccatcacgtggtgaacgtgaatctgcaacaacgatacggtagaatgggcgtttctttgaacccatacgtttcatacgaattttaactgacattaatgccacctcctattaattctttaacatgtcataatataccaaatttcaaacgccgtgtaaagtgttttttctttacaggacaaatttttttaagatttaaaacgacgcgcgtttttgagacgtttcttcttgtttttcttttgttttttcatcattgaattcatggccatcttacccattttacccttgataccgttgcccattaaaccttccatgccgttaaagttgccctttgacatttggttcatcatctttttcgattgattgaattgtttgatcatccggttaacttcaacgattgggcgaccagcaccagccgctaaacgacgacggcgactaggattcaataagtcaggattttcccgttcttgtggcgtcattgattgaacgatggccttcatatgcgccatgtctttcggatccatcttgatgttcttgagttgtgggttattagccatccctggaatcatcttcatgatatcttccaaaggtcccatgctctgcaattgatccatctgatccaagaaatcgttaaaatcaaagctattttctttgatcttttcagccatatcagctgctttttgctcgtcataatcttgttgcgctttttcaatcaagctcaacatgtcacccatcccaaggattcggctactcatccggtctggatagaaaatgtcgagttgatcaagtttttcgccttgaccagtgaacttaattggtttgccagtgacggcgcgaattgaaagggctgccccaccacgtgtatcgccatctaacttggttaggacgaccccggtgacatctaaacgactgttaaagccttcagcaacatcgacagcggcttgcccagtcatggcatcgaccgttaagaggatttcatttggatgggctagctcattaatatcagccaattcttgcatcaaggcttcgtcaatttgtaaacgaccagccgtatcaattaagacgtaatcgttcttttgtaaggccgcttgtgctaacccttgacgaacgatttcaactgggttgacatccgtccccatttcaaagacttgtgcgtcaacttgcttgccgacggtcttcaattgttcaatcgcagctggccgataaacatcggcagcaatcatcaatggccgtgctttttcattttggattaaatattttgctaatttcccggccgtggttgttttcccggccccttgtaacccaaccatcataatgattgttggaatatgtggtgatttattcaacggcacagccgtttcacccatcatcttcgttaattcttcatcaacgatttttacaatttgttgtgcaggtgataagctatcaaggacttctgccccgatggcgcgttccttgacgactttaataaagtctttaaccactttaaagttaacgtcggcttctaataatgccagccgaatctcgcgcatcgcttgattgacgtctgtttcggtaatcttccctttacgccgaagcttactcaatgcgccttgtagtcgttctgttagcccttcaaatgccattttttatcagtcctttaagttaattattgttcggttaaattcagtaagtcagccaacaagcgcatcagttcttgatcgtctggatagtgcgcttgaatatacttttgtagcgtatctgcactggcattttgctgttcgtaattacgatagagatgcagcttttcttcgtaaccctctaagattttctcagtccgacgaatgttgtcatagaccgcttgccgactaaccttgtattcagcagcaatttcgccgagagaaaaatcatccccataatataatgagatataactatgttgttttgccgttaaaagtgcgccataaaattcgaacaacgaattcatgcgtgcgttttgtgcgagttccatttgacgcctcctagacttagtttgacctaactattagagtaccgattttaacgggcttagtcaacgttttattgcgcgatttaactagaagtttgtgcataaattatcttttcactggtataaacaaaaaatcatgctaaaatagaagtgtaagctttttcataacttaaattgaaatttctacggaggttgtatgatggcagcaacaattatctattggggcgttatattcgcattaattggttggggactctggaacttaatcttctcaatcgtctatttaaagaacaaggaaaatggtaatctttggttcttcgccattttaaacaccttaaccttattattcgggctattattctggtgggtcttcaacaatcacgcttggcaagaatactggttggttaaagcaaccgcaaccaacagtctactaggtggcgttttaatcgcctatgtcgtcttaattatcgcccaagtgattttgggacgcgaaccaaaagccaaaacagcttaatcattcattcaaaaaagcgtctgacaagaaattgtcggacgctttttcttattgcctattgaaataacaaatcaatataaaccgaaatgattagaagatctgcactgccacctaaactgtaatggccccgcgttgcttcgtgatctaatttcgttaatccttgctgacccgtttcagtttcgatcccaccagcagcaataatcgctgccgcttgcttttgaacatctctcaaggtttgtaaactgccgctacgcttaacaaggtttgaatcttctgaaacactaatgatttttattagtgtgttcactaaccgcgtattccaatcacccgtctgtgtctttaagtaagggtacgctgtttcaaatatggttggataccccgcctgtgcttcgccacggatcccaactaatccgtattgcaggtagagtttctcaccatttgttagccacgccggttccttttgactaagggccttgaaatcattctcaaccaatcccgccaacatggcttgaactgtttgacttaatttcagtggtgtcaatgttgatttttgcagtagataccccgtcgcactcaacaaaattcctagtgagaatatcgcccctttatgcgtattcacacctttggttgctgacaacatcgcgtcttccgctcgcataccaagcggccgaatttgagccattagtgctgttaaatccgattgctcaaacgtactacccacctgaacaaattgttcaaaaaacggtagtaacgcgacactactatcgataaacgtgaacagatccatatcggtgtgcgtttgatgatcgatgggatccactaaaccaggtttgggatagcagctcacttcatacaatagtgcacgttgcgcaagctgcgcgattgcttgggatgttttcatctaattcgtctccatcaataattgataatgttggttaattgcagcttgtagttctgccactgtatggcgtcgacttcttgcacaaacctttgccggctgatcacataacaagcatcggcgtgctggctgtccaaaatcttgccgactcacaggttgtgcttgttgcaaatcagcttgccaagttagcacatcgacgtcaaataaccggcctaatggatgctggtcttcaaaaataacagcgcgttgcttaatcttttctggtgagccatcaaccaccaaaaacgcttcgggacctgttggctgatcccaatcaatttgccgttgaattgttaatgcttgtttaaaagtggcaaagcctgtcttaaacagctgcgtcagtgccgcattattcttaatgggaccaggaatattgagcttgagtgtcacgacacttttatcggatgacgtcgaacgcaccaatttattttgtaaagccgcacgctgatcacgattggctaggaccgcattaatctcttgtggtgtgccagttgcaaacagattaatcatccgactagtcctttacttgatacacaacgtccattaaagtgccatcacgatactcaaccaaagcaactggcttatcggtgaaggctaatggtgttgcttgtccaacaattttagcggctttttgccgtaattcatcgatcgtgaacactggtacgcatggaatattgcttaatgcttcaatcaaatcatggcgtttggggttaatcgcaatccctaattcagtgaccaagacatcgattgaatcacctggcgtaacaacggttgtcacatcatcaacaatcgttgcaattcgtcctctgacaattggtgcagaaataattgttaacttcgcattggccgcgtcttgatggccaccgattgcccctcgtaaaacgccatctgaaccagtcataacgttcacgttaaacttcgtatcaatttcaagtgctgacaagatgcagacatctaattggttgaccgcagcccctttattataaggatctgcataccaagaagcatcaatttcttgttgattttcagtggttgccatactatcggccgcgtctttatcaaaatcctgcacgtctaagattttatccactaagccttcgttgagtaaatcaacagttggcttcgtaatcccgcctaaagcgaatgaagcggtaatggacttcttcaacattgattcgcgcaaataacgcgtaacagctaatgcagcgccacctgaacctgtttggaatgagaaaccttgtttgaagtaaggtgagtgtgtaataacggcattcaccatttctgcaattttcaattccttaggatccttggtaaagcgagttgcacctgaaccaattttttcagggtccccaacttgatcaacttttacaacataatcaacttgcgtttgcttgatgctggctggtgtattgggatatggcataatcgtatccgttaacaaaacaaccttatctgcatattgtgcatccatcaatgcatagccgagtgagccgaagacagcgtcacctttaatcgcgttcgcattaccgacttcatcagcattaggaacacctaagaacgcaacatcaatcttgatatcaccactttcgatggcccgtgcacggttcccatgtgagcgtaaaataactgggttttctaatccaccgtgtgagactaaatcccctaattcgccacgcatcccagaagaagtaatatgggtcaccacaccagccttgattgctttaacaaccatcttgttcatcacgttagtcagtgaacttggggctaacgttaagtctttaaaaccttggtcaatcaaaatttgcatgaccgcgttaaaaacatagtctccttcacggaaatgatgatggaatgaaatggtcatcccattttttagacccactttttgaatcacatcttcaatcgatgaaactaatttcgcgtgtccctgatcagctgttaccttaggggcgacacgttgaatttcaggatgaccgatttcaaccgtttcaaatggttggtaagccattgtttgcattaaatcatctggtaattcgcgttgtactttattcagcataccaatttccctcctgatcaactaaatgtgatgcttccgccaacatcatggtccgttgcgcacgcgccacaattggtttatcaaccattttcccatttaatgaaataacgccagagcccttaatccgtgcttcttcaatggcgtttaaaacgtcttttgcattttgaacatctttttcagttggggcataaatggcattcactaacggaatttggcgtggattaataactgatttgccgtcaaaaccaagttcgtgaatcaactcaacttcgtgattaaagcccgcttcgttatcaacatccgagtaaactgtatcaaacgccgcaatgccggctgctcgtgcaccatgaagaatcatattccgtgcaaatgaaagttctgcgccatcaggataacgatgcgtcttcatgtttgtcacataatcttcggcaccaattgcaatcccaattaatcgatctgaagctttggcaatcgctggcgcattcaagaccccttcggcactttcaatggctgccatcattttagttgttttagccggaatcttaaaataatgctcggcttcagcaataacggcttcggtttcaataacatcgtcaaccgtttccgtcttgggtagccgaatcacatcgacgccagccttgaccattgcaaagatatcagggcgcccaaaaggtgtttctaacccattaatccgtacgactaattctgtttcaccgtaatcaaccgtttgtaaagcctgcattactagcattctagccgcatctttttcggtaagtgaaactgaatcttctaaatcaaacatgactgaatcagcaccgtaaataccggcatcctttaacattccagggttattacctggcacaaacatcatcgtccgtcgcaaacgttccattagccaagcacctcccaatctggatcattttctttatcagttgcccgttgaatcaccgtgattagtcgcgctttaatggtgcaatctagcgcgcctttgtcgacagccttaattttgacatttgtaatgccgtattgatctaagatggtttgcattaaagtccgaatttgagctccaaattgtttttcaacagcactttctaattcgatttcagttgcaccttcaaccttagaaagcatgatttgaatatcactcgactctaacgttcctgcaattgcagtatgtttaatttccatcaacttgcatccctttctgaattctggcttgtaaactagcctggttttgcttaataaattggtaagttgtatctggtacaaaattttgaacggtttcaatcatgcccgcttgaacggcttgtctaacccgcgtggcagagataacctggtctgccgcctgtcgtcttggaatcaccttaacagtcacttcaggtggcaaattagtcgccaatgcttgattgtataatgccgttgttttggaaaatggttcttcccctaaaaagcgatattgaatgtttaactgtgccgcaatttttttaaataattgggcatccaaggcggtttgatatccaatcacatcttgtgattctggtaaaaagtaagcagggaaggtcgcataactaaccatatagtcgcttgttgggactaccaccacattcgttaaatccgcgaccccttgttgaacgagtttgaagcgttcggcggttgtaaacagcgagacatcttgactaaccacaaaaacataaacgaaatcactcgcctttgccgcctgctccactaaatagcggtgccctaatgtgaatggattggcattcataacaatcgcactaattgcggcttgcgtttgtttttgaacccttggtcttggtacctgtgcaataaattgttgtagcgaaacatcacccgtttctagcaaaacagcgacgtcagtttccgccaataaattaaacccgacaaattcaaagctttgtcgatattttggtttcgtaaacacaaagatgtgaaaaatacctttttgcgccaacgcgctaattaatgtcgaaataatggcattaaataacttgccatcttgataatgatgatcgaccgcaatgtactttagcacatttttctgataggcccccgtcgcaatgagctgctgcccttcaaaaataccaaagcacgcctctacatcattcacggtttggggtaacccttcaatcccctcttgtgtcagtaacgtgacccattgttgataataatgagtttctttcaaattaagctgtcttgtttgttgagaataatccatgtggcactccttctaagcgaataggcgcattaagaaaatagaaagggtaaccgtaatcgcaccacctagtcgaacagcaacttgtgcaaatggcataagaaccattcgatcgcccgctgctaaaatcgctaaggcaccggtcccaccttgtccgctacaacacgaaaccgcaattgccgtatctactggatacatgcctaaaagttttgcactgaagaaagctgccgttacgatccctgtgacagtcacaacaatcgtaattaacattgggacattcgtaaagaccgtaatcaatgaattccaaggcgtcattgcaaccccgaccccaaacaagagtggcggtgtaattccctttaccgttaaactatataatgaactcccaccagcttgtaaactttcaggaatccagcctaacattttagcagccatcacgacaattaataacacgattggtgcgggtaaatgaatcacgctattgacccacactcctaataggtaaagggcaactgctaaaatacctgatactaacattttttcgatatcagcgccgcttgttttttgtgttaagttatcaagtcctgattcagcttcatcagtatctactaaacgcccattccccgttaattcaggatgaacgtcaccgatttttttcaaaataccggctaagataacggcaaccaaactccctaacatgacgcaaggtagaatcatcgcaaaaatcttaggttgcgtcatcgaaataattgctgcgtaacccagtgataatggcagtgccccttcaccgacaccaccggccataatcggtgcaacaacgtaaaaataactcttccatgcagaaagacctaataacgttccgactgcgatgcccaaaagtggcccaactaattcacaaatcaataagacaacgataattctagtacttgccttgattaatgttttccggttcatcgcgctaatactaccaacgattaatagggcaataaagaaagctaagaaattatttcgtgtcataaaatctgtgacaacgtgcacggtacttttaggtaaccagttttgataaacgaggtatgagggtaagaatgtaacgactaataccttaccacccaatgatttcaagactggaatgtgtttcccaatttcttcaagaataaatgagaataatgtcatgacccctagcgcacctaacatatcgttaggcatctggttattcattgttaatagaatgtaaccaagcgctagtattaaatatagcggcattgggataatcccaatgtgtaatgcaataaatttctgaaataaattctgattgttgatagttttttttgcttccatcactaaaaaccccattctaaatcattatttatactgctttactgcttctacaaccgtattgacaacaccttggtcaaaaacccctgggacaattttttcattcgttggtgcttgaatcatattcgctaatgctttggcaatttcgccttccattgctgtttcaaaatgtgtaatgtgattttccaataaacctttgaataaccctgggaacgccaagatattattcacttggttaggataggccgaactcccagttgcaatcacagcagcacctgcttttttggccaattctggatcaatttcaggtactgggttggctaatgcgaagataattggatctgtcgccattgattgaaccatctcagccgttacaagctccccaacggataacccgattaacacatcttgatcgactaaagcttccgctaacgttgttgcatctgtttctggttgaaccgcttgaacaaattttaattgataatcattcaaactggtttgttgatcacgaatgacccctttttgatcaaccaatgtaatgtgttgaatcccaacgctcgctaacaatttagcggttgctaaacccgaagcaccagcacccgtcaaaaccactttcaaatccgttaacgatttaccaaccactttcgcagcgttgattaaacctgctaacacaacaattgcagttccttcttgatcatcatgatatactgggatatcaagcacttcattcaattgatcttcgatttcaaaacatctaggcgctttgatatcttccagatgaataccggcaaaacttttactcatatttttaaccgtttgaacgaattctggaacactcgtttgttctagcgcaagtggaatcgcatcgactccggctaactctttatacaaaagcgcctttccctcaacgactggtaggccaccttgtggaccgatatcgcctaaacccaatactgcggagccatcagtgataatggcaactagtttgccgctaatcgtatattgacgggcaagcgctggattttgttggattaacttacttaaccccgcgacccccggtgtatatgcttttcccaaatcagtacgattcgttacgggtaattcaccgtgaatactcaagacacctgtatgtttttcatgcaatgcttttatttcatcaagagccattttatcaacctcccattttgataaatttgaagcattttaaaatatttcaaaaaacacgattatttttaaaatattttaaattaataatacgtctaatgcttcactttgtaaatagaaagcgctatatttaatatataaaatttttttattcgtctttgcgaataaattcattcaaggagcagcccatggccgaacaaacaaataccaacctattaatcgatattgctcaagatttctatatcaaccaattaaccatcgctgatatttcgacgaaatatcaggtgagtcgttacatgatctcaaagtatctcgatgaggcactcgcccagaatatcgtttcaattagtatccgctccccttttgcacggaaccaagaacttgaacgccaattggccgccgtcaatcctggccaccacttctatgtcctagcgaacgctgaacaaagcaataatgatgcggatcgtttttactcatttgcggcacaaacggttcaaaatctgattaatcctttaaaaattattggtctcagttggggagacaccgtctataacgttatcgaacactttaaaccaacggtcaaggaacagttaattttcactcaatttatgggcgaaaatggcaagtataattcactggcgggctcaatgcgcatggtgcaaaaggccgccaataaatacaatagccactattcaaccctcaatgcgccgctttacatcatcaatgatcaggttcgccaactcttaagtttagaaccagcgattcaacccaccctcaccaccgcgcgtcagatggatttaattctcactaccttaggaacaattgaatcattagaatctattcctagttggcaagagagtctagttgcattgttccctaatctcaatcgcaaggaagtcgctggctttttatatggtcgaccattcaatcatgctggtcaattcttaatcaatcccattgccgacaaaacatttggcttagccattgattccattttacaagtgccgattcgggtagccgtcgtgaacaataaatttaaaagccatgccgttgcagctgcacttcgcggtaacttcctcaccgatcttgttttagatgaaccaactgctaccaaaatcctagccattcacaattaacgcaaaaaaaccgccaagacaaactgtcttggcggttttttaggccttgataaaggctaatacgatttgattaaagagggctgattgttctgccatcacaatgtgtccggcttcttcaatcacctgtgcatgcccatcagcacccatttgtgccacgattggtgcgaaggctggattgaaaaacgggctcttttcacccgcaatcactaaatacgggcgcatactctggcgaatcacatcccgccaatcttgaaatgcatgatcgaccaacaacggtaaatcaagctgccgatcaaacggtgattgttgcttgacttgtgccaccacatcagccgtatccgtatcgattgcccggtaagtcgccttaccaaaatccaaacgcaattgcagcggaaaactatcccaagtcaaatccttaaaaccaaacgaccatgtttcatccgcaatcatcttgggtgactgatcaacaatcacgactttgtctaagtcacgatcaccgtacagcgacatgtatgcccaaatacaagcagcgcccattgaattccccactaaaattggcttggccaatccaagcttggtgattacttcagcaagatccagcgccattctagacattcgcaagcccttgacagtatgttgtgccattccttgattacgaacgtctagttgaatcactcgataatgatgagcttcaaaaaaggctgcttgcgcatgccaaatttccttggccgccccgaatccagcgataaaaagcattggctgcccttcaccaatatcagtataatccagtgtaatttgatctgaagttacaaatttcatttaattgcctggctaacgtcagtatctacgtcactttgtggcccatcaccgacaataatatccttgaataagccataaacaaagcggtttggatcaaagagttgtaagtcgttcatttgttcacctagaccaaccatcttcactggtaagtgtaattctgtgcgaacggctaacacaatcccacccttggccgaaccatctagcttggttaagataatcccagtcacatcggtcgtttgcttgaattgtttagcttggactaaagcattttgtccggttgttgcatctaagaccaacaatacttcttgcggtgcagctggtacttcacgcgtgatgatgcgtttcactttttccaattccttcatcaagttgacgttgttttgcaaacgaccggccgtatcaactaataaaatatcgaattgttcttctttagcgcgcttaaccgcgtcatagacaactgacgctggatcactccctgctgcactagcaaccacggggacattatcccggcgaccccattcttgtaattgttcgatggcgcccgctctaaaggtatcaccagccgctaataagaccttcttacccgctttttctaattggtgggcaaacttcccgattgaggttgttttccctgcaccattgacaccaacgaataagaagacagttaattcgccttgtggagcgaaatgcaattgattatcttctgcttggtcttcttgaccgtacaaatcaactagcttttcaacaatcgcttgtgaaaccgcttctggtttcttaacgttacgcaacttcacttcgtcacgtaattcgtcagcaatcttcatcgctgtttcgtagccaacatcggcttcaattaacatttcttcaacatcatcgaaaaaggcttcatcaacacttctaaagttagcgaacaacgcatttaagcgttgcccaaatgtgagccgagatttttctaatccatcatcatacttcttcgtttcagcagcttgcatgtcgccagttactgcttctgtttccggcacttcttcaatcgcatcggattcttcagttactgccgacgcttcaactggttctggttctggttctggttctggttctggttctgggtttacgggtgccgccgttggtgtgtcaagcggtgataccgtttctgaatcatcttcagttgctaaactggctggttcatcggtttcagttttctcagctgccgcagtttctgcaggggtttgcgattcaaccggcgtagcgtctgattcaaccggtgtttccggtatcgcttggtcttgttcaaccggtgtttctttttctggttcggctgagaatgcttttttaatacgatcaaataatcccatggttttcctcctaggctgttgcgtgttcttctaatgaaacggaaacaatcttcgagattccagattccgccattgtcaccccgtataagcgattggcttgggtcatcgtcccttttctgtgggtaatcacgatgaattgtgtatcactctcataacgtttcatgaaacgaccgaaacgatcaacgttggcttcgtccaacgaagcttcgacttcgtccaaaatacaaaacggcactgggcgtacttttaagatggcaaacaataacgtaatcgccgtcaatgcgcgttcaccaccagataaaagactcaagcgttgtagtttcttaccaggtggttgcgcaataatgtcaatcccactcgttaatagtgcgcttggatccgtcaacgttaaactggcatggccgccaccaaacatgatcgggaagatggtttcaaaagcagcggcagtttgttcaaacgtttccttaaaccgcttttcaacttccgtatccatttcagccatcgatgctaataattggcgcttagcgtccatcaagtcggcatcttgttgcatcaagaaatcgtaacgttctttaacatgttgataatcatcaatggccgccaagttgaccgttcctaaatcagctaagccgagtttcaataatttcaacttagaccgcaattgatcgtcggttaagtctgatgcggccaaagcggccttggcggcttcgtaagtcaattggtaatcttcgctcaatgtatttaagcgttgatcaatgttaattttaacccggttgagcccgacagcattttgttcttgctcagctaaactatttttttgtaattggtagacgcgtgtggcattggcttgaagcgtttgttgttccgccttcagcgtttctttttgcgcgcgttcagtggctaacttcgcttggactttctcaatcaaagcattggttgcctttagcagtgctcgtcgttctttttgactcgaagcatcttcttgatccgcttgttttagcgcagctagtttatcctgactggccttcaactgggctgccaggtcgttgctattgcgagtagcaaccgttaatttctcctgaacattcttttgttcagcttgagcgacagccaacttggtttcgagggctgtttgttgttgcgcaatttgtttttgactctcatcaaaatgttgtaattgctcattagctgtttcgagatctgcttgcagctgtgcaatcgacgcaacaatttcagcttcggctgccactaattctgcctggcgttttaaatcttcctcataagcttgttgttgttgttgcacttgataatcggttgcttgttgttgccgttcaaactgactcaaacgttcgtcagtcaaggctaacgtattttgggcagcttgatattgattcttagcggtttccaatgccgcttgtttcgtatttaattctgcttggcgtgccgttaattgagcttttgcggcttggacactggcttgcttttgatccaaagcgacctgcatcttggcaatttgaccttctaaatcagtcaaggtttgcttacgcgcaagtagcccaccattgttttgtcggttattatggcccccagtcatcgaaccacccgggcttaaaatatcccctgctaacgtaatgattcggtaacgatgccccgtcaattgactcaatttaatcgccggctccaactcagtcgcgacaatcaaattgcccatcaaatggttcatcaccggtcgcacttgttcatcaaactgcacaagctcactggcaattccgataaatccaggctgctgttgtaattggtgaactaagctacttggtagtaaacgtggtttgacaacgttattgggtaagaaagttgcccgcccaatccgattggttttcaaatactcaatcgcttgtttggccgtctgttcatcccgtgtcacaacttgttgtagctgtgcgcctaatgctaattcaatcgcttgttgatactcactgggcacttgcatcaattccgctacagcccctaataaaccagggaactgttgtttttgcttcaagacagccttaaccccttgataaaagccggcgtagtcatcatttaattccgcaagactggcttgttttgctttcgctttttgtaaaataccagacgcttggaaccaactattttgttgattttggtaagccgcttggtccgtgttaatttgcgtttgtaattcggccaactcattggacaacgtttcgtattgcgctttgagtgtttcaagttgggctttttgggccgcttgttctgcctttttttgtgccaattgcgtcgatgtctcatcgactgcactatcttgccgtgcaagttgcgttttagtttgtaacaagttcttttctaaatattgttgttcattatgattggtcgtttgggcttgcatctgatcgatgtattcttgacgaatttgttcaatcttcgctttcagttccgcttcactaccagacgcttggcgtttaagggtggttaactccgtcttcaacgcccttaatgccgtcaccttttcttcataacttgcctttaattcagattgattggcttgttccgccgttaattgctgttttaatgtgtcgatctgttcgactaaactttggcggttcgcatccgtataattagcgcgctcttttgaaacgttctcttggcctaatagattttcagccaagcgagacttttctaacaacgtctgattatcttgttctatttgttgttccaactgggctaaggttgcctgattctcggtttgggcagccgtcgtcttagcgatgtccgcttcaatctcttgcaacgcttgcgcaagggtttgcgccttttctttgtacgtcttttgatcagccactaattgatcaatttcaatcaccaataattgttggtgcaacgcatcatattgcgctttttgatccaagtaatcctgcgcaatactgctttgttccttcaacggttcaacttgtccccgtagttcatgaagaatgtcggtgacccgactcaaattttcatctgtttgatctaattcagattgagcctttttcttttgttgtttatatttcaaaacaccggccgcttcttcaataatattccgccgatcttctggtttactgttgaaaattgcttcaacccgaccttgcgaaataatcgaaaaagattctcgcccaaggccagaatccataaataaattaacgatgtcttttaaccgacaactcttttgattcaaataaaactcactatcgccatttctaaataaacgccgcgtaatcgttatgttggcttgttcttgtttcaaatattgatcgctgttatcaaaagccagcgtcacttctgccttattcatctgtggtcgaatatcagtcccggcaaaaatgatgtcgggcatcttttcgccccgtaagctcttggctgattgttcgcccatcgcccaccgaattgcttctgtgacgttacttttaccgctcccgtttggtccaacgatgcccgttaaaccttctgaaaaattgatttctgttttatcagcaaatgatttaaaccctgataaaaccaatgactttaactgcatgcactaaactccctacacacggcggttggtttcaactgtcgtttgcttctttctttatttcagtttggcaagcgccactttagcagctgcttgttcggctgcttttttgtttcggccaacacctgaacctaagacgcgatcgcccatcataacatccacttcaaattgacgggcatgtgatggtcccacttctgccaataacttatattcaatctcaacttcaccatcttgttgcaagaactcttgcagattggtcttataatccgtttggtctgaaaattcaccggcttcaatcttgggaaagacaacttgttcgatgaatttaacaactgcgccacgcccttgatctaagaacaaagcgccgttaaacgcttcaaataaatcttccaaaagtgttgctcgtgcccgcgcaccgtttttttcttcccctttaccaaggcgaatgtatcgatcaaagtgcgcttctttggcaaaactactgaaactcttcgtgcagacgattgccgcccgtaagcgtgtcagtttgccttctggccagtccggatattttttatataagtattctgaaaccgtaatttccatcaccgcgtcgcccaagaattcgagtcgttcgttatcacgaagacccaactcccggtgttcattgacgtatgacgaatgtgtaaaggcttcgtccaatagtgctaaattctgaaattcaatgccgtagcgggctcgaagctcgctcactagtgctgcatccaaaattaaattaccccatttcaactgtttaatctttcactattataccgtttatacgcttaaaaaaacagcgtcgttcctagcaaaccgtttcttttattaatcactaaaaaacgcctgttttgaagtattcattgtaacacgcaaacgaatatttcaaaacaggcgttgctttatgcagatggcgttgtcattgctgctaaagcggtttgataactcgctagttcagcttcagttgcatagacatagtgttcatcggccacttcgcgcaattgacgaccttcattatctgcctcaattgaactatcataagcaattcgccgacgttgccgctcgacctttggatcaggtaacggcacagcagacaatagactttgcgtatatggatgcaatggtcgatcataaatgtcatcggctgatgccaattccataattttaccgttatgcatcaccgcaatccgatcactaatgtatttcaccatcgataaatcatgtgcgatgaataaatacgtcaagttttgctgttcttgaatttctttcatcaagttaaccacttgtgcttgaatcgatacgtcaagcgccgaaatcggttcatccgcaatgataaatttaggttttaccgcaagcgcgcgggcaatcccaatacgttggcgttgcccaccggagaattcatatggataacgcgttgcatggtctttattcaaaccaactaattccaaaagttcgttgacgcgtgcatcacattctgcatcatttttaaccaaatgatggatatgcaagccctcagcgatgatgtctttgactttcatccgtggattcaatgacgcgtagggatcttgaaaaatcatctgaatctctttccggaacgccttcatttcacgactatgatttttaatcttactaatgtcacggccatcgaatagaatttcaccatctgtcgggttatacagccggatgatactccgcccagttgtactcttcccagaaccagattcacccaccaagccaaacgtttcgccttcatagatttcaaatgagacatcatcaatggctttgacttcggatttttttccttggctaaaatattgctttaaatgtttaaccgacactaatacttttttatccttgtccatcaattgtccctactttctcttgaacttgtgtcgcctgatacttagccatcattgcacggacggctgctggtggttctacagctggtgcatctggatgcaacaaccaagttgccgcaaaatgcgttttcgacacttggaaaaatggcggttcctgttccacatcaatttgtaaagcatatggattacgcggtgcgaaggcatccccttttggtggatccaacaagtctggtggggtccctggaatggcttcaagacggccagaagtatcaagtgttggcattgagttcaataagccccacgtatatggatgcttgggttgataaaaaatttcatcaaccaacccatattcgataatcttaccagcatacattaccgctacgcgatcggcaatccctgccacaacacctaaatcatgcgtaatgaaaataattgaggtttcaatcttgcgttgcaattccttcatcaaatcgataatttgtgcttgcactgtcacatcaagcgcggttgtcggttcgtcggcaatcaggatttgtggataatcaacaatcgcaatcgcaatcacgattcgttgccgttgcccaccagaaaattgatgcggataatctttcatccgtgctttggcattcggaatacccaccaactctaaaacactctgtgcacgtttcattgcttcttccttattcattgttttatgaatcaacaaaggttcagcaacttgtttaccaatcggcatcgttggatccaatgacgtcatcggatcttggaaaatcatggaaatatcgctaccacgtaaggcattcatttcctgttctggtttttgtaagagatcttcattgtgatacttgattgtaccacccttaatttgagcattgcccgctaacaagcccataatactacggaccgttaccgacttacctgaacctgattcaccaacaatcgctagtgtttcgccttttttcaagttgaaactgacatcgcgaatagcatggacgttccctgcgtaggttttaaaatcgatacttaaatgtttaacttctaaaatatttgccatttgacgacctccaatgatgaaaccgcgtggaaacggccttgtattgacatgctttttgaaactgactctgcttctaaacgtgctttcattaactgctttttatggttagctacgtctaacaaataatcaacaagttgattattcgccagactatgctaatccgcgaaagataaccgcctacttacacacgctatgattttggatcgaatgcgtctcttaatccgtctgctagtaagttgacggcaatcatgatcacacagaggactgctgctggataccacatttgatatggcaagaaacggaaagctttttgcccatctgataataacgtccctaatgaagcattcggcgctggaatcccaatcccgataaagctcaagaatgcttcgaagaaaatcgcactcggaattgtaaacatcgtttgaataataatcgttgaggataaattcggaatcagatgtttccaagcaatcttggtggaactttcacccaacgtccgtgcggcgagcacgaattcttgttccttaagttggaacgtttgagcccgaatcaaccgggccattgtaatccaaccggtaaacccaatcgcgatgacgattgacaataaacctggacggagtaccaacatcatcaagacaaccacaattaagtttggaattgatgaaatgatttcaattacccgctgcatgaacatatccaaacggccaccacgccatccggaaacaatcccatatggaatcccgattaataaatcgaccaatgtcgctagaatcccaattaataaggataagcgtgtcccgtataaaattcgtgataataaatcacgaccgagataatccgtccctaagataaacgttttgcctttgggaacgcccgcttgttgatatttatcaactttaacaccggaaacgtccatcttaccggtaaaaccagggatattccccgatccaattttagggggtaggttagcgtacgccacattttgtgtatttggactttgtggtgcaatcactggtgccaataaagcagccaacatcacaatcaagaggacaactaatgaaaccaccgcaactttattttgctttaagcgccgaatggcatcttgcgtaaacgtcaatgatggtgcactaattttttcttgtgcttcatgcgtgtcttgtgtaaggggcttgaatgagcccgctggtattttaatatccgccatttagtgcgccccctgactgtcacttaatcgaattcgtggatcaataatcccgtaaagaatatcgacgactagaataatcactgttaataagaatgaatagaaaatggtcaagcccatgattgttggataatcattcgtcataattgacttcacaaattgttccccaatcccgggaatcgagaaaatattttcaacaactagtgacccagtcatcaagttgactgccatcggcccgataatcgtaacaactggaatcattgaatttcgtaaggcatgctttgccactgtttgccattttgaattgcctttggctttagcgagttcgatgtaatcactgtttaaaacatcgaccatttcagtccgcatgaaccgggccgtattcgccaatggtgcaaccgctagtgctaatgttggtaagacactagatgaccagccgtcccataacgcaattgggaatagttgtaatttaaaggcaaggaaaaattggagtaagaccgccaacacaaagttcggaattgaaatcccaacgattgaaaagaacgttgcaacgccatcgacccatgtattcttgcgaatggccgccactgcccctagtaaaatacccagtaatgagccgacaatcatcgcttgtgccccgatttgtaatgaaggtcctaaacgcgtcatgattaggctcaagacgggctgattgttgaactggaaggatgtgccaaaatcaccatgcaacaagccacctagatagatgaaatattgctgaattaatggtttgttcaaaccgtactgttcattcatgatccgtaattgatcagcactcattttttcctgattcgtatatggcgtccctggcatcaacttcatcatgaagaaggtcacagaagcgacaatgaatagggttagcactaaatagaatattcgtttaacaaggtatttactcataagttcgctcctaacaaaaacgggcttcattgtttttcaacgctgaaacccatctttataaagtcagtttatttttttaaataaagtgagacattattgtagcttcctgaagggccgtagtctaaacctttaaggcttgggttagttaagtacgccacacctgattgatacagtggaatgacacctgactctgtattcataatatcttgtgccttaacaaggttttgccatcttgctttaggatcattggcgttgtcacctttacttgccttgatctgtgcatcgtattcggcattgctccaatggccattattgttatcgccgcctgttacaaacaagtctaagaatgtgactggatctgggaaatcagcgttccaagcactaaccaccatgtcgaaatcaccgttcgttgaacgtgttatacgagtcttaaatggcacgttcgctaatgtgactttcaaacctggtaagttcttttgtaatgtgttttggagatattcggattgtttcttggcagtatccgtatcatcgccaagtaatgtgtaattgaatgttttgcctgtttgcccagtttcagcaaggccttcgttccaaagttttgttgcttctttagggttgtaacttacatttttcttacccgctgcgtctaaatcatcaacaaaatctttcttagttgttgggtcaaatgacatattctttggtgtcacagaagcaattggacttgaaccatcacctagaacctgtgcgactaattctttacgattaattgtcattgaaattgctcggcgaatcttcgcatttttaaagattggattcttttcttggttgacttgcatgtagaatgttgctgctttttgtaaggttgagtaatgtggatcgtttttcatttgtttagctgtgtcaccactgatcgccgtccgatctaatttattactttggaagaggtttaaagctgttgatggatctttaaccacttgatacttcaacgtcttaaccttaactgctttcgcattccagtaattggtgtttttaacttctttccatgagctatctgggccattccaattttctaatttataagggccgttgaaaactaatgttttagaatttgtcccgtaactcttgccagctttcttgaccgcttctggatattgggggaagaatgttgaactggtcatcaattgactgaagtatggaattggtttttcaagggtgacttctaaggtgtgtttatccttagcgactacacccaatgaattaaccggttccttaccagtcgtgatgtctgctgcatttttaatgccttcatagatataagcatattgtgaaccgacctttggatcaacgactctgcgccaagcataaacgaaatcttctgccgtgaccggttgaccattgctccacttcgcgtcttttcttaatgggaatgtatatgttaaaccgttattagttggtttgactactttagtcgcaatcgccggtttaatttctttaccctcgtagcggtaaagaccttccatcgtatcggttaaagcctgtgcaccgatcacatccgtatttaacgctgaatccattgtcgcaatgacatccccagttgcaaaactggctgtgtcagtcttaacggcttccttgctacctgagttaccacaagctgctaataataatgtgaccgccactgttgttatacctaataccaaactcttttctcgtttcatatggacactcccttcagttattaaaaataataatacatgattaaaaatgaaaagtaaataataaagattaaaatattctaatttattttcattgatgcagagccattataagaatcattctaatattataacgcatccgcaaatgattattatgtgaataatctcattttcacaaactgtttaaaatgcaaaaaaataagcctgtcggtcgcgaatactcacaaccaacaggctcgttttcaaggttattatttgatttttgttttaatgtaagcaacggcatcagctaccgtaccgatcttttcagcttcttcatccggaatttcggcaccaaaagtgtcttctaattccaaaacaaattccacaatatcaattgaatcagcatccaagtcttccttgaagttcaattcgtctgttacctgatccttatttaactcaaatcgatcgccaataatagccgcaatcttatcaaagatttcttgttcattcataattaaaaacctccaaattgaaacccttacctacgtacttaacactttgggtatccagtgattatacataacttcgcaactcaattcaagtaaatcaaatcagacttgcgaagtatattgtagcgcctttggaacacattgtccacctattttaatcggtttcttttgggctattttgttggtcaaaataatcgattactttttgaatcgtttggttcgccagcattgcatgaatctggcgaacagtgtagtaaaccgtgcggccatctgcagcaccgtgcgccttaacaacaggggcttttaagcctaataaaacagccccgccataaacagatgtgtcgaatttatcacgaatcccaccaacactctttttcaagagtaaaccaccgattttttctttgacaccagcatccataatcgcatgtttgacttgcgacatcacgattgtggcagtcccttcaattgctttaagcgtcgcattgccggtaaacccatctgtgaccacgacatccgcaacgccttttaagagttcacttgcttcaacgttaccaatgaagtttaacgttagatcatctgccagtagttgatgtgctgccttatgcaactcatcacccttgccagcttcagtcccattattcaacaaaccaattcgcggcttttgaatgccacggacgtcttgtgcgtagaagttccccattaagccatattgatgcaaatgctccggctttgattcggcgttggccccaacatctaacatattgaagcctaaatctgaattaatggctggtagggtaggcattaaacctggacgatcaatccctttaatccgaccaatcacgaataatccggctgctaagagcgcaccagtattccctagtgaaaagagtgcgtctgcttccccatctttaactgcctgcgccgccagaaccattgaagcttgctttttacgccgaatcgcacgcactggttcatcttcgctggtgattttttcggtggtatgcacaatcgttaaccgcgtcatatcatcaatcaacggtttaatttgtgcttcatcaccatacaacgtaaattcaacatctgttaattctgagcgggcttgtaacaccccttcaattactgattggggtgcaaaatcgccgcccattgcgtctactgcaattttcatcatcattcctctttccgttttcaatctaacgttaggtaattttgcttttgttgttgtaagtatgttttgagtggcgtatggtccggtgctgccaactcaggatcaagcgtgaagattttttgcacttcttgttgggcgacttgtaaactcgcaaagtcggctactggatcgccaactttaaagacgggcaatccagattgacgatcaccaaagacttcccctggcccgcgcaattctaaatccttctgcgcaacgacgaatccatcagtggtttcagtcataatcgtcatccgatcaacaccttgttggttcttcggatcagccaccagaatacagtatgcctttttcttacctcggccaacccggccccgtaattgatgtaattgcgccaacccgaaccgatccgcatcaaaaatgagcatcaccgtcgcgtttggcacatcgacaccaacttcaacgacggttgttgaaaccagtaattgaattttgttctcagaaaaagcgttcataatctgatttttttcatcatcttttaactggccatgcaacaatgcaacatggtaatcaggttcaaattgttccaccaacgttgcgtaaatctcctcggcattctttaaatccatctgttcagattcggcaatcaatggtgtaatcgcaaagacttgcgaatcgtttgcaagttgtttacggacaaagctgagggcttgttcgacttgattactacgcacccaactggtttcaattggaatccgtccttttggcaattcatcaatcgttgaaacgtccatctcgccatacgcggtaatcgccagcgtccgcggaatcggggtcgccgtcattgcaagaatatcaggctgtaaccccttttcacgcaaaattcgccgttggttgaccccgaaacgatgttgttcatcaattacagcaaagcctaacttatgatagaccactgcatcttgaatcaaggcatgggtgccaataataatattgatgcgcccggattcaatgtctgccaacaacgtccgccgttctttagccgtcgtcgaaccggtcaataagccaacagtcacgttcattggtgccaataagcgttgcaagctttgatagtgttgttccgccagaatttccgttggcaccatcaatgcggcttgataacccgcagtcactgccgcgaacagcgcaatcgccgccacaatcgttttcccagaaccaacatccccttggagaaggcgattcatatgcgctggtgattttaaatcaagacaaatttcattcaccactcgcttttgtgcatcggttaaatcaaacggtaaggtttgaataaaatctttaagtgcttcattttggtactgcaaagctaaaccgtttgccacatgccgatcagtctgtttaatggcttgtaattgaatctgatataggaagaactcatgaaaaatagcgcttcggcgtgcttgctttgcttcaggatacgttttagggaaatgcatgccagcaattaagtcgcgttcgttcattaacttatagcgcgtgcgaatatcctctgggatcaattcgggaataacgtcttgatacaaatcaaaggcttcttgaatcatcttgaccagtgtcccttgacgcacacttttattaacggaatagatggccgcaaacgatggattctcagccgattgaaccgctaggaccttcatccccgtcaatgtatgacgtttagcatcccacttgccataaatagcgacatcgaccccggcttcaaacttgtccttaagatagggttgattaaaaaaagtaaccatcacaacgtcatgttcaatcaagagccgtacattcagccgggtcttccctggtccccaacgactgatgatcggatcagcgacgaccgttccttttaacgtcaccttttcctgatctgccgcttcggataaatccttgaccttcaaatcttcgtaacgaaacggaaaataatacaataaatcactaatggtccttatgccaagctgatcgagggctgtcagacgtttcgggccgacgccagctaacacagcaacagaatccgttaaacttaacattgacagcctcctgtaacgtgctttcaaaagcatcctgttgcgtttagcaccattagccaaacaagtagctacgctagtcattcggctaattaaactaatcctcacaggataagcacttttgatacacttctttttcttaacgtgctttttaaccatattccaaggttaaacgtacttctactaaaaaacgggaaccaggtatattcaacctcattcccgttttatttgattaactattcaactgaaatcaagtatgggtaaactggttgattcccttcgtgtacttcaacttctaattctgggtcttgggccataattgcatcactgatttgttcagcttctgttgcatcgccgtcttccccgataataattgtgacgatttcactgtcttcatcaagcattgtttggaccatttcaatggctgctgttaaacgttcagccgttgagaccttaatcttaccatcgataatccccatgtaatcgtctttcttaatttcaagtccatctaaagtcgtgtcccggattgattgcgttacttgaccactaatcacggtatctaacgcctctgtcatggcttcttgattaacagccaattcagcagatgggtcaaatgataagagagcggtcatcccttgagcaatcgtccgactttgcacgattgcaactggaatatcagccacttcggcagcttgttcagcggctaagaagatgttcttattatttggtaataagatcacttgtttagcattggctgctttaatcgcatctaaaatatcttgcgtacttggattcatggtttgaccaccacttaagatataagtagcccctaaactcttgaagagttcagcaatcccatcaccggccgcaatcgcgataatcccattttcaacaggttctgcttgcacaggggcagcagcttgttggtcgttttcaacaatcgtatcatgttgtaaacgcatgttatcgactttaatcttcactaatgaaccaaagtgttggccgtaagccatgactgtccctggatgttctgtatgcacatggaccttcaccacttcttcatcggctaccactaagagagagtcaccaacaccgtttaaatgattgcggaattcatcataatcaaattcgcgatcgacagttgtcccgtcaccaagggcgaccatgatttcagtacaataaccattttcaatatcttctgtacccatttgagcggtttgatgatgattggcattgaccatttcatccatttccgcttcatcaggtgtgtaaagatcttttgcaggtgcttggcctgttaaaccttctaagaaaccttcatagatgaagaccaatccttgaccaccagaatcgacaacgccgacttcttttaagacagggagtaattcaggggtcttcaacaaggccttcttagaaccctcaacaacagcttcgataactgcaccgatatcatcagtttgaccggcaaccttggcaccagctttggcgccttttctggcaaccgtcaaaatcgtgccttcaacgggtttcattactgctttataagccgtttgaacaccatttgtgaatgcgtcagccaaatcttgtgcatccaacgtttctttttcagccatgctcttagaaaaaccacggaaaatttgtgaactgataaccccggagttaccccgagcgcccatcaaaagccccttggctaaactcttagataattcaccgacagattgcgcgttgttttcattaactgctttggccccactttgaaacgttaaactcatattggtcccagtatccccatcaggcactggaaagacgtttaatgaattgacaaattctgcatttttagtaagccgatgtgcagcaacccgcatcattgcttggaattctgctgctgtgatttcagtaactttcacgaatgttcctccttgaacaaaaacaaatagaactggacctagtggccagctccgctaattagttttagtcttctaatacccgtacaccttgaacataaatattcactgagttcgcaccgacacccaacattgtttcaagattgtacttcactttactctggacgttacggcaaacttcagagatcttaatgccgtaaccaacaataatatagacatcaatcgcaacgccattgtcttcttgacggactacgacaccccgattataattctcacgattcaaaatatcgtttaaattgtcacggatttgattcttacttgccatcccaacaattccgtagatatctgttgcagcgccaccaacgacggttgcaatcacgttattggtaatatcaatatcgccatattgtgttttaattttaacagccattaaaatagcctccttgtgccatacttattgttattttagcatagcggagaagagttgcaaagcaactggtgatgaattcttccccaaatgcggcttatttttggactttaatgagtttaaacgacttattttggactgtcaagtaaatttccttgaaagagctcttgcattccccaaactattatggtaaattatttaagtgaattgtataagccggtgtgcatgcatgcaactattaagactaactgaatcatattatgtttctcgttaattctaccggctttacttaaaggaggaataagaccatggcaaaagacgttattaccggccgtaaaacatcatttggcaacaagcgttcacacgctttgaacgcatctcgtcgttcttggaagccaaatttacaaaaagtacgtatcttagttgatggcaaacctaaacgtgtttgggtttcagcccgtgctttgaaatcaggcaaagtaactcgtgtataatttcaattgatagatcgccagttggcggtctatttttttggcaaaaagtgcgagataagtcggctaatcctcaggcgatgactgatcgaacacgtttatggcaaccaaaaagacggctcggataaaataattttatccgagccgtctttttaatccttactttgaatcaccgcaaccaccccagtttcaaaactaaattggccggtctcaccgatgaactcattactagcccatgaaatcgggacttgtgtttggtaatccaccaagcgatatttttcatcaattaaatttaaaccagttgtgggaactaatggcacaaaggccagataccgtttatcggcttctttttgtaattgatacgtccctggtgcataaaagcgaatcgtattttgccgatcgcgcatctctaagcggtctaaaaacggcttaaaacggctttctaagggcataaagagattagcaagaaagtggtccaaccgaccgcctgttgcgccataaagcacaacttgatccgcattaaattcagttagcgcaattgataatgccaactgagtgtcggtatcatctttttctgcttgcacagagcgaatatcctttactgctgattgaacggtggtccgctcagccgccgtcaatgaatcaaaatcgccgactgacacgacaggtgttacgcctttttgcaataagcgccacgtaccacggtctgctgtcacccattgaccatcaatcatttctggctgcgccaattcgggggcccactcactgactggtcctcccaccaacacattaatccgcgtcatgagcagcctgctttaaagttgcaatccgggttgctaaatcaccggcaaacgtatatgaaccggcaacgaaaacatctgcgcctgctttggcacacgcaccgatggtttggtcgttaaccccaccatcgacttcaatcgtataatctgcatcagcatgttgatcgcgataagtcgctaattcagtgaccttatccaacatcgctggaataaacttctgcccaccaaaaccgggattaaccgtcattactaagacttgatcaaccaatgataagactggttcaatcgcactaactggtgtccctggattgatcaccacgcctgctttaacaccagcatctttaatcatctgaagaccacggtagagatgttgcgttgcttcggcatgaatcatgattaagtctgaaccagctgctgcaaattgttcgatgtagcgttctggttgttccaccattaaatggacatctaagcctaacgttgtcaatggccgcaagccagttactacttgggggccaaacgacatgttggggacaaacatcccatccatgatatccacatgtaatagatcagcgcccgccttttcaaggttttggacgtctctttgtaagttcataaagtctgcgcttaaaattgaaggtgcgatttgtttcatcatcaaaactccgatcacatttttattttgacttcttgtaaactggccgaatatcctttaattctgctctaaactgtaaataattcgtataacgactttgcataatttcgccactgtcgacagcttctttcacggcacatttcggttccatcacgtgttgacacgttctaaacttgcatccttgcccgatttctctgaactctgggaatcggtcaaccaaggtttcaatcgtgacgtttaataaaccaagtgatgaaaagccaggcgtatcaccaactaacccatcattcaacggaatcagttcaatatgccgggttgtatgtttcccacgatttaaactctgcgaaatttcggcagttgcaatattcaagctcgggtcaatgtggtttaacaacgttgacttaccggcccccgtttgtcctgtaaagacggttgttttatgcgggaacgtgtcttcaattgccgtaattatctccggtgtaaaggcggtccgcggtgcaaaaatttgatagccaatcttcgcgtaatacgccaagtaatcactaatttcttggtattgttgatcactaatcatatcggtcttggttaaataaactaacccttgcatgtgcagcgattcaatataaatcaagaagcgatccaacaaattcaaggagaatgctggttccaccgccgaaacaattacgacagcattatcaatattagcgactggtggtcgaatcatctcatttttacggtctaaaatctcaagaatatagccactttctgtttcactttcactctcgaattcgacaaaatcgccgacaagtggcgtaattttccgtttacggaaattaccacgcgcacgcgttcgataaattttgccttcactttgtacatcataaaacccactgagggcgcgaataatctgtcctgtctgcaataggtcacctcccaattagtttgtcacatggtcatcagatagaatctcttgaccatttcttaaaatccggaaacggccggcttggtccgctttaatcgtaaatggcaattcaacggttgtatccgcggtaatcgtcatttctttataaacactcattattgaatgcgtgctatcttctaaataaatcgtaatcttattcgtcgtagccgttgaagtactacttgaactagagctcgtactactactgtcacccgattcgctcgagctgcttgtactactttgtgaagttgctaaggaattatcaaacggaatcgtaatcgacttcgtaaaactcttggtagcgggcgcttttttacctttagaaagtaccacgttaatattggcaccttcttgaatagatgcaccactaccaggtgattggctaatgactaacccttcatcaatcgtattggagtaatcctctgaaaaagtaaccgtcaaaccaacgtcatcaacatagtcttgaacagcctgtttcgtgtaattactcaaattgcgtaaagtaatgcttggcttgccgctgctgacagtcaaggtaatcgtcgtcttacttgggacaactttttcacctgcggcaatgctttggtctaaaaccagtcccgaagcaacactgcgtgaactctgatatttgcgcacaaccgtcagtcccttttgtttcaataacgtgctgacatctgtgaacggcttgtccgtataatcttcgatctcatactttttacgacccgtactgattgttagatcaaccgtactgcccgatttaacatgcattcctttaccaggcgtcgataaaatcacatgccctttgctgtacttattgctagtagttttttgaatcttaccaacttttaatttatctgcggttaatgctgcagtcgcgttttcttgcgtcatgtctgtcacatctggaacagtcacttcactgccttgcattgcgtacgcagcgaagaccccgagcatcactaacaagactacgccaagccccacaaaccaccatttccgcttcgacttcttatgcggctgtttctttttctgatcgtcttttacttcagtctcatctttgggtttggcttctggcgcattgttttggcgcgtaatcccttctgggtcaagagccggaatcacctttgtttcacccatatcaccttgtgagggcacgaatttcggttcatgcgcccgactagctgataatgaggtactcaaatcagtggtcatttgcccaacatcactgtagcgttcgtccggatctttggcagttgcttttaacacaacgttttccaaagcttgtggaatccgcggatcataatctcgaacgggtggtacagcatcttgaaaatgtttaatcgcgatggaaacagccgattcaccttcaaatggcaccatacccgttaacatttcatacagaataatcccgagtgaatagatgtctgaacgtttcgttgccattgaaccccgtgcttgctctggtgataaataatgcactgatccgagtaatgtattggtctgggtcatcgcggtttcactgagcgcaatcgcaatcccaaaatcgctaatcttaacgttacctgcttcatcgaccaagatattctgtggtttcaaatcacgatgaataatatcgtgcgcgtgggcattttcgaccgctgataaaatctgcgtcataatatcgacgacgcgttgataaggaatcgggaagtgctcaacgatatacttctttaaatctgttcccttcacatattccatcacgatgtattgcatgctgttttcttcaccaacatcatagatactgacgatattggggtggttcaattcagttgtggcaagtgcttcgcgtttaaagcgacgtaccgtgttcggatcgttccgtaaatcaagtcgcagcaccttgaccgccacttggcgatccaaaatcagatcttgggccagataaacgttggccatgccaccttctccaattggacggataatctgatagcggccattgaccgcgtagcctgtctccatcatcgcgcaccctcctcaccagtttgatgtaagattaacgccgtaatattatctaagccaccggcatcatttgcttgttgaattaatgccgcacatttttcttccagcgatgtcggtgtcatcagcgtggtcttaatttgttcatcatcgaccatattggttagcccatctgtacataataatagataatcatctggttcaaattcgtaaattgttacatcggcatcgacatcttgcgaaacgcctaatgtgcgcgtaatgatgtttttttgcggatgatgctttgccgcttcttcggttaactccccttgtttcaccaattcatttaccaaggaatggtcctctgttaattggcggagttcgttattccggaagcgatacactcggctgtcgccaatattggcaactaagtaattggcacctgaaatcaacactgcgacgagcgtggtgcccatcccaaacaaatcatcatactgattagccttcgctaaaatatgtttgttttctttttgtaattcgaaaattaaccatttaaccatggattcaatgtcggtatcatcagttcgttcgaactcgtacccaatatgggaaaccgccatttctgaagcaacatcgccgcctaaatgaccgcccatcccatcagcaacaatcgcaaactgcgcaccgcttttattggtataaaagccgacatagtcctgattattttggcgttgttggccgacatcggtttgaaaagcaactttcataagaattcacctcaattaataatttaagcccgtcgtgttaaacaagcgatgaaaaagccgtctgtttgataatcatcgggatagatttggacaaacggtgtcgcttgattggctggcaatggtttgtcgagtgctactggtacgatttcaaattctggatgattggccacaaaagccgcaacaacttgttgattttcttctgggacaatcgtacaggtactgtaagtcaattgaccacccacttttaaggttggtgcaacggcttctaaaatcgccaattgaatcttttgaaggttcaataagtctgctgcttggcgaccatacttgatttccggtttacgtcgcattaagcctaagccagaacatggtgcatcgactaaaatcttatcaaatgtttcaggttcaaattgttcaccgactttgcgtgcatcgagcgcccgcgcatcaatgacgtctgcaacatgcaaacgcttagcgttttgctcaatcaagcggactttatgttcatgaatgtctaaggcagtaatttgccccccttgactggcatccaaataagtcgccatatgtgtcgttttcccacctggggctgcacaagcatccaagatccgatcacttggttgtagttgcaaacttggtgccactaacatcgagctttcatcttgaattatatacgcgccttgttcgaacaattcaccgctggctaagtgaccgccgtgggcaactaatccagcggctacaattacactcggttcaatcgttaacccgtcagcctgtaagtctgccaaaacggcatcaactgaattaacacgggtattgactcgaatggacgcattcgctggttggttaatcgttgccaataagtgttccaattttgattgccctaattcttggtggaacttcgccactaaccactgcggcatactgtaagtcacacttaggcgttcgattggatcggcaattgctgctaaatcaggcaatccagtccgttgttggttccgtagaattgcggtgaccaacttagccgtgccagcatggcccatttgtttggcaatctcagttgcttcataaaaaatcgcatgttcaggaacacgatccaaataaacctgttgaaaaactgccgtccgtaagacttggcggacccaagttgccagtttagctggtttttgaataaagggggctaggtaataatcgagtgtcatttcatgttgaatcacaccatacacgagctgcgttaaaaaaccagcatcttggggattcaagtggttttgtttaatcacttggtcgagggccaagtttgaataactgttttgtttggcaaccgccgttaaaatttcaacagctaaatagcgtggtgtctttttaggcatcttgcaccaccacttgttgtccgactgcgagttgtttgccaaccccgtttaagaaagattggaccggcattttagccttaccagctggttgaatctcggtaatcttcaaaacactgccattgccggctgctaattcgaaatcctttttgttgatagcgacaatcacaccggctggttgatccgtcgttgtttcagcaacagttgcttgccataattttgtccgttgaccattaattggcaaccaagcgcctggttgtggccgtaacgcacgaatctggttgaccagttgcgttgctggttgctcgatatctaattgttcttgttccttagtaatattgtaagcaaacgttacttgtgcttcatcttgtggtgtccggggcgcggtttgatcgataatgcttggtaatgtcttcaataatagatctcgaccgacataacttaacttatcaaataaagtcccggtgtcgtctgaagcttcaattggaatgctggcttgttcaatcatatcaccggcatccatttttttagccatatgcatgatggtaatcccaatttctgaatcgccgtttaacacagcatattgaatgggtgcaccaccacgatatttgggcaagagtgaaccatgcacattgatggctgcaatcttagcggcttctaataacttcgttggcaagaattgaccatatgctgccgtcacaattaaatctggttgcaaggccatcacgtccgctaattcttgactaccactgagtttttcaggttgaaaaacagtcaggtttaagcgaacagccgcttctttaacgggtgtttgttgtaggacttgcttgcggccaactttccggtctggttgggtcacaacggctaggacttgataatcgtgtgccacaagggcttctaaaatcggtactgaaaattggggagtccccataaatacgatggatgtcattaatcaatcacgctcactttaagtaaattgtaggggttcattgtccaacccaatcttgaaaccatgacgggtatcaatttgggtcgtttcgagaatctcggcgagtttcgcctgaagttgtggttcctgtttatatttaatcacaatttgatagaaataacgattattaatccgcgcaatcgacttcggcgtcggacccagcacaatcgcttggtcggataagacgggccgtaattgacgggcaatctggaaactcttcttggctgccaacgcttcttcaggatggctaatcgttaactgtaccgtaaaataatacggcggatagccgccccgatggcggactgccatctcatattgatagaagccttcataatcatgttgcttggcaaattggatggcgtaattttccggattaaaagattgaacgataaccgcaccgattttatcggcacgaccagcacggccactgacttgcgtcaataattgaaacgtgcgctcacttgcccgaaaatcaggtaacccaagagcggtatcggcgttaatcacgccgacaagcgttacatcgggaaaatcaagccctttggcaatcatctgcgtgcctaataaaatatcggcatcgtggtcgccaaagcgtttgagtaatttagcgtgcgcaccttttttgcgggttgtatcaacgtccatgcgtagaatacgagcatttggaatcagctcttggagttctgcttcgactttttgtgttcccgttccaaaatagcgaatctggcgactctgacaatttggacaagtccgcggaattgcttcttcatgaccacagtaatggcacttcatcgagtgcgtatccatatgcaacgtgagtgagatatcacagttgggacactgcaagacaaagccacaatcgcgacacatgataaaggatgaaaaaccgcgccgatttaataagaggacgctctgttcgcccttttgcaaccgatcctttaacgcatctaatagcgcaggtgaaaaattgctgctggcttgttgcttcatcgcctcgcgcatatcaaccaactcaactgccggtaatggctgttgattaatccgttgcgtcaggcgcaagagttggtagacgcctttttgggcacgggcacgcgattcaagcgatggtgttgcactcccgagaatcactgggcaatgatggtactgactccgccagatggcaacatcgcgggcatgatagcgcggactttcatcttgtttataggaagcttcatgttcttcatccatgataatcacaccaatattctccaatggtgcaaaaacggctgagcgcgccccaacgacaacgctggcttctttgcgttcaattcgccgccattcatcatacttttcaccttcggataagccactatgtaaaacggcaacttgatcaccaaagcgacccttcacgcgtttgaccatctgcggggtcaaagcaatttcagggactaacattaatgcagttttcccctgttgcaagaccgcatcaatcgtttgtaaatagacttcggtcttaccgctgcccgtaatcccttcgactagaaaaacccgatcagattgggccttagtagccgctacaacggcttctaccgcatcagcctgttcatcagtcaacgccattttttgcgtcgttgtgacggttttaggataaggatttcggtaagcttcaactttaacttggcgtaaccaacctttgtcggcgcctgtcttgatattctcccgggtaaaagtcgtcttggccaaaacatcctttaataagggattgggctgatcaattaaactttgtaaataactaatgagttgactctgcttttgcgctgacttacgtaagccggcccgcgcttcttctaactgttcaaacgataatgccggttcaatcgccgttaattgcttcacgcgggcgcgatcatcgacatggtagaccacttcgattttcccttggcgttgtaactgcatcaattgttttaacttttcgggatctagcgactggtcaaacgttaattcgtcgttaccattgaacaggcttgcttgtaaggctggatcaatttcatcaactagttgcgcggtcttagaatacttagcacgcatcacacttgggagcatcgtttgcaagcacgtaatctgaaaggcataggtccgctctgccaaccaacttgataattgaagtaattctgaattcacagccggttgtaaatcaatgaccgccgtaatcggctttaattgcccctcaaaattggcttgatcctgaatggacaaaataaagccttgaattaatcgatcacctttgccaaaaggaaccgccacacgcatcccaggttgaatactgtctaataaagtatccggtacttggtaatcgtatggccgattagtttgcatcgtcggcacatcgacaatcacttttgcgatttgtggcatctaaatcctcctttttagttaatctaacaagtcagcaactcgttctagaatttgagtcgcaatcacccttttatccgccaacgctaatgtttccggtgctgcattcggttgtaaaagcgtaaccgcattttgatcaacaccaaagccccgatcatgctgactgacatcgttcgccacgagtaaatcaacatttttagctgctagtttggtttgggcattttgtagtaaatcatctgtttctgccgcgaatccgaccaagaattgatgcgtcttctgttgcccaagcgtcgccaaaatatctggggtacggtctaaagttaactgcatctcagttgtgttcggttgttttttgattttgtgcgtgacatattgggccggtttaaaatcggcaaccgccgcagccatcaccacaacatcggccccttcaaagacactgctaactgtgccttgtaattgcgccgccgtttcaacgtaaattattttgtgcaaaccagccgggactggcaattctggacgcgtgctgatgaggatcacattcgcccccatcgtcacggctgcttgggccactgcataccccattttaccagaagaccggttgccaatgtagcgtaccggatcaattggttcttgtgtcccaccggcagtcaccaccacgttctgcccgcttaaccgttgcggtccgaattgttgcgcaacttctgccataatcgcggtttcttcagggaaccgcccgacaccagcatagccttccgctaaaaagccggtatccggttccatgacagtatagccatctgctttaagttgggttaaattccgttgggtagctggattaaaccacatatgttcattcatcgccggcacaattaatttgggcgcggtagtggctaacaaggcggtcgagacaaagtcgtcagcaatcccattagcgagtttcccgattagattagcagtcgccggagcaatcaccgccagattagtccaatccgctaagtgaatatgggcaacccgatccggttggtcttgattaaacaaatcagttaacacgggtttacgcgttaatgtggcaaacgtcagtggcgtgacaaattcggttgccgcctgagtcattgccacttggacctcagcacctgctttaatcaatccacgtaccaaattagccactttgtagacggcaatgccacctgtcacataaactgcaattcgtttattcgttaaatccactttcaaaaccccctaaaactaaaaaaactgcactttaatttaaacatccatcgatgaataaactaaacatgcaggttctttaattattcttattcgctgtctttttgagcgagcttatccattttttcagcatctttttcaagcatcaatgaatcaggatcaataatgacattgccagcagcaatttcttccattgccatcccaaccgttttaggtgatttgtattcagataacatcttaatatcaccggcttcgatttcatgggcccgcttgctagctaaaacagccaatgagtaacgtgagttcacgttttctagtaacttatcaattgaaggatatacaatcatattattattcccctatcattttcttgtattggtcgatcacacgtggcactcgtaagtgttcactttcgataatcttttcgattcgttgaaccgcatttggaatttcgtcgttgacgacagcataatcgtaattttccatcatcttgatttcgtcggctgctttttgcatccgcttatcaatcgttgcttgatcgtctgtgccgcgtttttgaattcgattccgcaattctaataaatcgggtggtgtcaagaagatgaagacgccatcgggacacttctcgcgcacttgcattgcgccttggacttcgatttctaataaaacatctcgccctgagtctagtgtctgattcacatacttcatcggtgtgccataataattatccacgtactgtgcatactctagcataccatcatttgcaatttcttgctcgaattcttctttgctcacaaaataatagtcaacaccatcttgttcgcctggtcttggctttctcgtcgtcatcgaaactgaatagtgaaaatcacgaaattcatcttctagcattgcttgacggacagttcctttaccgacccctgatgggcctgataaaacgatcaacattcctcgattggacatctacgtaattccctcttcttttataaaatagttaaagtctattctgcactatttggcgggaaatttcaagtctactttgtttccatctcatttaaaattaaccttaaggacgcaatttcgtcgtttgacagcgtcacacccttacccattttggcatgatccggtgcccaatctcgcaaatcaaattttggtgcacgttgattccaagagattaaattcaattctttacgccaaccagctggattttcactcaacacaccgatttctgccataatttcatattcaattttgcccatcaaatcaccctttctatcagttcatcctattatacacgaaaaaaatcaaaaaatgccgcttgcaattctgaacgtttgttcgtataatgaaaacacaaacaagtgttcggaggatgaaatcatggaatttaaacaagcaacggttagcggactcagtcaacaattggttaaacaatatcaccgcttttttgaacttacaccagaagcgactgcttttgttgaacaaccccaaatgcaacctgctcagattcaattatttatgacccaagcgtttgaacgccactaccatgttgcggtgcaattcaatgttaacgatcatctcgaacaagtgaccgggcgcttggttaaacaactcagtgcgaacaagtatctgctaaaagagagtcgttcgaacctctacaagattgtcctttgcaatcaaattcgttacattcaaaagaaaaattaagcaaaaaaataagggtgcagccaaaaaaatattttggctgcacccttattttaatgtcggcgactttgcttagccgtttccgctaatgccaccaattcttcggcatgttctaaagttaactctgttacttcagtccccgctaacatccgtgccagttcagcaatccgttgtttaccggttactttttgaacggacgtttctgttcgattttgtttcacttgtttttgaatttgatattgatgatcactcattgctgcgacttgcggcaaatgcgtaatgcagagcacttgcgaatgttggccaatttcactaatcttattggcaatcgcttgggccacacgcccactcactccggtatcaacttcatcaaagatgatgctagtaacgccttgtgattcggagaaaatcgttttaagggctaacatcaagcgcgataattccccaccagaagcaattttagcgagtggccgtagtttttcaccagggttgggttgaatgtaaaattcaactttgtccatcccggaagccatgaactgttcctgttcatttggcaagaattcaactttaaagaccgtcttttccatgtataacgcttttaactgttgatgaaccgctttttcaagttgcttagctgctttttggcgtaattgcgtcaacgtttgtccgtttgtcctaagttgttgttcaagttgcgtgaattgctgctccaactcacttgcgttcgcttcagttgcttgcatcgctgctagttcagccccgattttttcaccataagcgagaatttcggcaattgaatcaccatacttatgttccaaattattaatagtttctagccgttgttcgatttcatctaaccgtgcttcatcccattctaagtttgaaacttcccgactaatatcaatgctactatcttgcaacgtgtaataaccagtctgcagactgtccgcaatacgcttgaattctggatcgagttcagcaatttcttgcatctgattcattgcaactgcgatttggtctaacgcattcccgtcttctcctgctaaaatcgtgtgactggcttgcaatgcttggttaattttttgaaagttcattagtttggctcgttcttcgactaacttgctttcttcatcagcctgtaattgggctgcatcaatttcgttagtttgaaatttcagcatatccaagcgttgggcccattcttgttcattttgctgtttttgcttcaaggcacgctgtgctttacgataggcagcataggtttcggcataggctgccttcgcggttgttaacttttggtgcgcaaattcatccaacaaccccaagtggcgatctggatacattaattcttggtgttcattttgaccgtgaatatcaactaaggtttccccaatatgcttcaaagtggttgtattgaccaaatgaccgttgacccgacaaacattgtgtccattaacggctaaatcacgctgtaataagacggtttgttcgtcgtgttcaatgccaaactggtctaatactgcggcggttgcgccattaggcgtcatcgtaaataagccttcaagggtcgcttttttagcaccagtccggataaagtcttgtgaaccccggccgccagcgagtaacccgactgcatcgataataattgacttaccggctccggtttcccccgagagcaccgtcatcccttcttcaaaactaattgctaactgatcgataattgcaaaatcgtgaatgaccaactcttgtaacatctgatcatccccctttcgtttctcttgatgctaaaaaaacttgccaaattactttagcaagtcttcaataaacttcgtaaactgtttagcattttcttctgatttacaaatcaccaacacggtgtcgtcgccgccaattgtaccaaatacaccactgagctgcatttgatccaaaagattagcaattgccgtcccgttacccggtaaggctttaatcacgacaaaatagtcttgttggttatgcgtaatataggcgtcacgtaaaatccgacgcaacttttctttaacgtctaatttcttttcaggcggtaggctatagtgatagccctcgtccgcatttggcactttaatgagctgcatttctttaatatcccgcgaaatcgtggcttgcgtaacatcgatgtcttccgcttgtaacagcttcacaaaatcctcttgtcgttcaatctcatgggtctggattaaattttttaacagtcgttgccgatctaccttgcgcattaaaacaccctcttcatgtgagaaattattctattcctcaatgatagcgcatttatacataaaatacaaagttttatacactattttcccgttggtcgtttcaaagcagcataggcattctctaaaaccgtatcaatattcatgtttggggccatcgttccagtctcagccgtcgtattccgtagatgaatcaagaattcaatattgccttcgccacctttaattggtgaaaaatctaaccctagcacgtcgtagcctgtcgctaaactaaaatcaacgatgtctttaaccaccatcttatgcactttcggatcacgcacaatcccgtgtttaccgacattttcagggccggcttcgaattgcggcttaattaaagcaaccgcttcgcagtccggtttcaagatgggtttcaacggcaccaaaatcttatgtaacgaaataaacgaaacatccgtcatggcaaaatctggtagaccattggtgaaatcttctggttgactgtaacgaaaattaacccgttccatcacgacgacgcgtggatcttcgcgcaatttccatgctagttggttataacccacatctagtgcgtaacagagtttggccccatttctaagcgccacatcagtaaagccccctgttgaagaaccgatatcaagtgcgattttatcctgtaaatcgatgttgaaaacctcgaccgctttcgccaattttaaagcccctcggccaacatacggaatcttacgccctttgacacttaaaacagtttcagcgtcgattttttcgcccggtttgtcgattcgttcatcatttttaccgtacacttcaccagccatcacagaccgttttgcttgttctctggaatcaaataatccctgttggactaataatacgtctacccgttcttttttcatctgttctcctattcattaaaatagtttaaaaaactatttaatagtgctttatctaacccggataaatccgttaaagcagtttgcgcggcctgacaagtctcatccaacgcgtcttttgcaccagctaagcccaataagcctgggaaagtattcttatgttcgtcagcatccttatggaccgccttgcccatcgcttctgtagtgcttgtcacgtctaaaatatcatcttggatctgaaatgccaacccataattttgcgcaaaaagctgtaaactagccatttgttcatcggataaatcagccaaaatcgcccctaagccgaccgcgcattcaatcaaacggcccgttttgagctgatggacttgtttcaattgagctaacgataaagttttagtttgtccttcgatatcttcaatctgaccagcaaccatgccacttggaccggctgcttgcgccaataatcgaacagtacggctctgctgatcagtcgtcaaatcggtcgtcgttaaccattcaaatgcaagtgtcaataacccgtcgccggctagaatagcttgcgcctcgccaaaaaccttatggttcgtaggttgaccgcgccgtaagtcatcattatccatcgccggtaaatcatcatgaatcaatgagtagctatgaattaattccaatgcccccgctacgcgatacgccgtttgattaatcggtcgccccacacttgcaagcaccgcaaataccaaaagtggccggagacgtttcccgccagccatcactgaataggtcatcgctttttgcaaggttggttcttcaatctgggcaagttgctcagtcaaataggtttcaaatgcgggcacttgttggcgcgcgaacgttttgaaatcaaccattattcttgtgcctcaacatccaatgggacttcttcgccattatctgccatcactttggccatcgttttttcagccttacttaaggtttcttctaatgtttgacttaatttaacacccttttgaaaagcagtcatcgctttttcaagtggcacatcgcccgtttccagttcattcacaattgcttccaattgtgctaagttctcttcaaatgttaatttcttttctgccatcttattcgtctcctttatgagtggccgtaacacgcgcgttcacgaggccatcttggacatgtaactcgattgattggtcgatcgtaaaatcggtcgtttttttcattacattttgattatcatccgttacataagcaaatccgcgtcccaaaattttcaacggacttacgagatccaaggctgccaccgcttgtccagcctgttgccgccgattttggacaaggctctcgattgctcgtttcaaacgatgatcggtatcagtcaacattctttgtgcttgttgaatcgcaccacttggtgattgcgactgcaggcgttgctgcaagagttgtacattctgttgactagtctgtaagcgttgttgttgcgccaacaataaacgacggtgcaactgatcgacattttgtaaatagccgtcatacaagcgttgcggctgttttaagacgtaactgttctgtaagtggaccaattgctttttgtttaatgccaatgttttcgaaaatgcctgatataaccgcaaacgttgttgttgcaacttcaacacttcgtccgtcaaaaccggtgttgctaattcagctgctgctgttggtgtcgctgcccggacatccgccactaaatcagcaatagtcgtgtccgtttcatgaccaactgatgaaatcaccggaatctgactggcaacaatcgcgcgcgcaacgcgttcttcattaaacggccataaatcttcaatcgaaccaccaccacgaccaatgataattgtatcgaaatccccttgttgattaacttgattcagtcgatcgactaaaatatcagccgcaccgtcaccttgaaccaccgctgggaataagacgagttgggcaattggataccgacgttgcgtcgttgttataatatcgcgaataacagccccagaaggactcgtaatcaccgcaatccgttttggaaagcgcggcaatagttgctttggtgcatcaaacaagccttcagccgataatttagcttttagctgttcataggcttgatacaatgcaccaagaccatctggctccatccgttccacatagatctgatagtttccagttgcttcgtataaggaaatccggcccacaacaagcactctcatcccctcttcaggagtgaacttaatcttttcaaaagcggacttgaacataatggcactgatcttagctttattatcttttaaactaaaatattgatgcgcattcggtcgtaagcggaagtttgaaatttcgccggttaaataaacccgatccaaatacggatcgcgttcaaatttagcctttaaatactgcgttaatgcggtgactgttaaatagtctgttggtttaaccacgtttagcacgttcctttgcaatctcaatcgtttgatccatgagcatcgtaatcgtcattggccccacgccacgcggaactggcgtcatcgcactaacatgtgatttaagggcttcaaaatcgacatcaccggtgactgttccatcttcaagccgattaatgccgacatcgacaacaaccgccccttctttgacatcctcaatgccgaagaagtgtggtttaccgatggccgccactaagatgtcggctgttttcgttagggcttttaagtctgccgttctgctgtgcgcaatcgtgaccgtggcattggcattgagcattaaagctgccaatggccgaccaacgatgttactccggccaacaatcacgacatttttgccagccacgtcaatatcgtgagctgccaataagcgcataatcccatttggcgtacaggccactaagcccggttgattaagccataatcgcccaatattgactgggctaaaaccatcaacgtctttttgtgggtcaatcgcccggataatatggtcttcattaatttgttttggtaatggtaattggactaaaatgccatcaacggtttcatccgtatttagttggcgaacaaccgctaataaatcagcttccgttgtttcagcagacaggcgttttaactcagatgccatgccaattttagtcgctcttttttgcttgctttgcgtataaatcgcacttgctggatcatcacccaccatgacgaccactaatttcggggttaccccttgttgtttgagtgttgccaccgtcatttgttgtgcttgtgttaattcatttgcaagtgctcgaccatctagtaattccaaagttaacaacccctatttatcgatatttgatgtttctattttagcatagttaatcggttaattccgggttatcagctgataatgaccgtttaaattcaaaaaaacacgctaaaaaaatactttttaacgtgttttaagtgatttcgttcgtattttactaattaagcttcaacgaatttagataaaacgccgttgataaaaccttttgcttgatcatctgtaaattgtttagcaagttcgagcgcttcattcaacgccactttatcgggtgcttctgttgaattttgcatttcaaacaaccctaaacgcaagataattaaatccggtttggctaaccgtgatagttgccagcccttcttcaagtatggcgttaaagcggcgtctaattctgcttgatgttctgtgacgcccgttaccaagaaggcaaggtagtctggaacagcaacttcttcaacttcttcagcatcgaattgatccatggttaaaacggcttggtaagcatctgccaattctaatgtgtcattagcatttaacgcaaacaacacttgaaatgcagcttggcgaatttggtgtcggttaaaattaggcattaagattggtctccattttgatcaggtgtttcatcgttaaataagtcatctggatcaataatttttggtgctttttcagtgacaacgcccaccacgtgtacgttgacttctgctagttctaaatcagtcatgaacaataattgttctttaagggcttcttgcatcgcaagggcaaccttcggcacagaaacaccatagttcagataaacataaacatccgcattcactttgccatcaatcaccttaagagttacccctttaccgtgattcgaacgaccaaacaattcgttaatggatgatgataacgtcccccgcatttggtggaccccatcaatcttgcttgctgcaatccctaaaatcacttccacaacttcaggtgccatttgaatcttgcccaatgcattttcttgtgtatcaagtacaatatttgtttcttctgccatcgaaacccctcctaacaagttcttgctaatttagcctatgcccgtgagatgtaactcccatcagatgtgttaatcgttaacaaatcaccttcgttaacgaaaaacggtacttggaccactaagccagtttcaagtgttgctggtttagtaccacccgaagatgtatcaccacgaacaccaggttctgttgcagccactgctaaatcaaccgtgtttggtaattcaacccctaaggtttcactaccatacatcatgatagaaacttgcatattttctttcaagtatttcaattcatcattgatttgtgctgctggtaattctaattgttcgtaagtttcagtatccatgaagacgtggttgtcaccatctgcataaagatattgcattgattttgtatcaatgattgctttttcaactttttcagttgaacggaatgtcttttcttgattggcacccgttcttaaattcttaagttttgagcggacaaaagcgccacccttacctggtttaacatgttggaattcaacaatccgccataggttgttgtcaaattcaatggtcaagccatttttaaaatcatttactgataacattgtttatcctccgagcattatataagtatgccattgtcctaatcatagcaagaaatcaggctcaaaagcaagtatttctagccttttatccctaaaagtagctataaaaaaagggaccggcacccgccaatcccttttagcgtattcaatcaagcaaaagtcgatctgaacactcacttttagattgtcaatggtttgttgcctgagtaattagtataccagtaaaactggatttacacaaacagagtgtgacatcagtctgggttaaccggagagatatgactgatggaacacgtttagaatgtgacgacagccccgcttctctcgcacaaaaaaacacccacacaaagtgggtgtttaaaaaattatttagcttctgcagcgtatacagaaacctttttcttgtttttaccgaggcgttcgaaacgaacgacaccttcgataagagcaaataatgtgtcatcgccaccgcgaccaacattttcacctggatgaatctttgtaccgcgttgacggtaaagaattgaaccagctgttacagtttggccatcagcacgtttagaacctaaacgacgacctgcagagttacggccgttagttgttgaaccgccacccttatggtgagagaagaattgtaaattcatttgtaacatctaaatgcacctcctgtttattaactgtctatttacgttttgtttgtacttgaatgtactgcccgtattgttgcgtaatatcttcaagcgtcaactgcaaattctgcaagagaatctgagctgtcgctaaagcttggcccgaaaccgttgccggaatctgacaagttaacaaaccaccattcaggttatctgcttctacctctggttcaaaaccagcaagcttttgcaaactgttgattgtcccgattgagacagcagaaacagctgcacagacgatatcactcccgtaaggacccgagtcggcatgacccgtaatttgaaaagaaataattttcgaatcggcattgaccgtaaagtcagcttgaatcatcttatttccctcaattaggcgttgatagcgtcgatcatcactttagtatatggttgacgatgacccttcttttgatgactgtgtttcttaggtttgtatttgaaagtaacaactttcttttcgcgcccttgtttttcaacagtaccatcaacagtaacaccatcaatggttggtgtaccaaccttagttgtttcaccaccaactaaaataacttgatcaaaagttactttttcgccagcttctgcggctaacttttcaacatagattgcttgaccagcttctaccttatattgtttgccacctgttttgataattgcgtacatgtgtgcacctcctattttttcttagactcgccaactaaggtgactaatcatagtacttaatgccttagtatgcgcggttgcagctgtggagctcacaattacaacgttcatattatatcgaatatcacagggcgagtcaatgctttattacgcctcgacaaaaaattgtgcgacatcgaacgtcgtattaggtgtttgtaccaattggtataacatcttagccatgtagcgtggtgaatacacaagcccgtcattgacccacttaaaggccaacgctaaactggcccccgctaaataatcaatcgtaatactcatctcaatttgatcagcctgtgaagtctgattatagcgcttagccacgtaatcctgcattaattggcgcattgattcagtcagttgtgcctgaaagtgaagcgtcgcctcatttttatagaacactttaaaagcagcttgttgttgttcaacatattcaaaaagtgcctgtaaactgacctgacgatatgtctgatcgaccactacagtcacttgctgataaaaatcggccaccaaatcggccaccgcggttcggatgaaatccactttatcttcataatggagataaaaggtcccgcgagtaattgccgcttgcttggtgattgcttgaatcgaaatcccctttggcgtactgtctttcagcaagataatgagggcttgacgtaattgttgctttgttcgttgaacacgtggatcttgcgctcgtaaatctgtctcacgaaccatctgatagttcccccaatcttttaattaaattcacctgtcgatagtatagccgctcagtgaaaagtctgtccattaatcggcttgataacggcccttgatcagttgaatatcccctagtgtacactgtaaatttgaagattctgttaacgaacacccaaaaagtaaactttatcccccacaaatttaattgttgttcgtctgcggttatagtaaaatgagcgtagtatttcaaatcggatagcgttaggtggtcgtcactttgatttctgcattcttcattattttcatttcaatcgttttattcgccgtcattgctagtcaattgactttcaaaatcggcttaatcacaaattgcgtgctctttatcattttagttggtgttgatgcttatctattcagctggggtagtggttctcactgggtgtacgttattgtcagcctactcggattagtcgctagcgaattattattagctgaactcccccatcttaaataattaggttaacgtcaaaaagcggtccaactcatcattgagttgaaccgctttttttagtgcccctgccaaggactctcagtataccatattaatcaagtaaggttgtttctttcacttcatcaattgtcttggtaccagccaactgcatggtaatcgataattcatggtttaagtgttcaaaaacagattgtaccccttgggcgccacctaaatttaaaccataaataattggccgaccaatggccactaaatcagccccacttgcgagtgctttaaagacatgttcaccacggcgaataccactatcaaaaacgattgggacgcgttttgcgacttgttgcgcaattaaaggcaacacttcaaatgaagcaggcccgccatctaattgacgcccaccgtgatttgaaacccagatgccatctgcaccagcttgaatagcaatttcagcatccactggtgattgaatgcctttaacaaagactggcaaatttgtgatttgtttaatcttttgaatatcttctggtactaatccttgtttagcggcagcataaatttcagagatgcccttcccagcaccgtcagaattactataagctgctaaattaggcattggtagtgggaattgcgtctcgatgtccgcttcacgataaccacccaatgttgaatcgacggtgagaataatggcttttacacctgccttaacggcttttttcaataagaactcattgaattgatcatctttactcatatagagttggaaaaatttgggggcatcaggagccgctgcggctgcatcttccaccaatgtattggcataggtactaattgagaaaatcgaaccagccgctgcgacccctttagcagtgtcgacttcccctttttcatgtgctaacccttgggttgctgagggggcttgaataatcggcgtttttaaatcaatatcccataatttagtatgtaaatcagcgtgatcgatgccttttaacacacggggcattatttttttagtattgaaagcactggtattttcagccatcgtccattcgtcttcagcaccgccacggatatagccaaacgcgccagcttccattcgttctttcacgcgtccttctaacgacgctaagtttaaaatatcgattggattttccgcttcacttgtatgatatcccatgatagattccttctttcaataattgaatacctttatcatggttctcttatcaaaagtaagcaaacatttatactcggttatttcacttgcgttcgaaatccaatgtcttgccggtaaaaagtcgtcggtaaagcgagttgtgctaaatcccgatagacctgttgactagctcggcctagcgtctcagcagaataactagcggtatacaaacgcccgccagcgctgaccaattgattggcttgttctgcgacactagcgaaactaaatgtgctgttgcgttttgcaaattgttgcaaagtgggtaaaacaaacggcgttgtcgattgtgtcgggtaaccatctgaagccaccacaacacctaacgtaatgcctgataattgccactgtaacgttggggtttcccccttcaataattgtgcaaaaacttgggcccagtcgcccgtcatccgtggtagcaccacttgtgtttcaggatcaccaaagcgcacattaaactcaatcactttcaccccgtgttgtgtggcaattaagcccgcatacaagacaccggtaaaaggcgtttgacgttcagccatcgttgccacaatcggttctaaaatagtcgttaccgcttctgcaacgcattggtcactaatctggggtactggacaataagcgcccatcccacctgtattaggcccacgatccccgtcaaaggcgcgcttatgatcttgagcaaccggtaatggatagacgcgattattcgccaccaacgccatcagcgagaactcttcaccttcgagataatcttctatcaataactggggcacgccctgttcaaagaacgcctgaacagtttgccgcgcgctcacgtcattttgagcgatgacgacgcccttgccagccgctaaaccatccgctttaatcacaacgggataacgaacgtcatcgagggcatccagtgccgcttggacagtctgataggcttgataagccgccgttggcacatgcgcggccgccataatttctttggcgaaagttttagacccttccaatgccgcagctgctttacgcggtccaaagatcgctaatccagcgtcttgaaaagcatccactacgccagccactaacggttgttcaggcccaacaatcgtataggcgacctttttggcctgcgcaaaggcaatcatcgctgcaaagtcagtcatctcaatcgcaactgtttgaatcccatccaattgcatccccggattgcccggcaaacaatagaccgttgcaacagttgaactctgctgtagcgcacgcgcaatcgtgtgttcacgcgcgccgctaccgattactaatagatccatgatttgcctcctattggctagtgtttgaaatgacggcgaccagtcgtcaccatactgattcctttttggttggccatgtcgattgaatcttgatccttaatcgaaccaccaggttgaataacagctgtcacaccatgttctgcggcgtattcaacgctgtcatccattgggaaaaaggcgtcagatgctaagacgaacggtgcttttaatccattggcttccgcttgttcgattgcaatcttcacagagcccacccgattcatttgccccgcaccaatgccgagggtttggtcctttgttgcgaccacgatagcattactcttaacgtgtttaaccacacgttgggcaaataacatcgcagcttgttcatcagccgttggtgttttgtccgtcacaaccttcaattcagatgcttgatcagtcacccgatcacgttcttgcacgagtaagccgcctaaaacagaaaccatttcgaagcaatccgcttgcttagcagcctcaaaatcaagcgtcatgacgcgtaaattcttcttcttttctaaaatggctaacgcttctggggtgtagcttggtgcgatgataatttctaagaataaactatgtaattcttcggctgtttgaacatccacttcacgattcaaggcaatgatccccccgaaaatcgatactggatcggccgcgtaggctttttgccaagcttcatagatggttgcacccaagccgacgccacacggattcatatgtttcatcgcaaccacacaaggttcgctgaattctgagaccactttaaccgccgcatccgcatctttaatgttgttatacgataattctttcccgtgtaattgtaccgctgaggcaatcgagaaagccgttggtaaactgctttgatagaacgctgctttttgatgggcattttccccatagcgcaacgcttgtttaaagtcgtatgaacgtgttaatttttcagggaattcgatgccgactgcttcggttaaataaccggcaattaagctatcataagctgccgtgtggcggaatgccttggctgctaaataacgacggtaatcaaccgcagcttgcccctcatcgacgacgtgttcgaggacttgcgcgtaatcttgttgatcaacgaccacgtacactgatttaaagtttttagcggcagaacgcaacattgaaggtccgccaatatcaatttgttctacagcttgcgcttcagtaatccctgatttttgaattgtttctttaaaaggatacagattgacacaaactaaatcgattgtctggatgtcatgggctgctaaagcggccatgtgtgttggttcgtcgcgtttggcaagcaagccaccatgaatattgggatgaagtgttttaacccgtccatccaacatttctgggaaatgagtgacttcatcaatcgcaattactggtacttgcgcttcttgtaataccttgaatgtcccgcctgttgagatcacctcgtaaccagctgctactaatcctttagcaaattcaataattcctgttttatctgaaacactgaccaacgctcttttcattgattgaattactccttctattttggtttttaattaattcagcaacaacttgcggataaatcgcgtgctctgtatcgtgcacgcgttgttccaatgcggctaaactatcgccaggcaacaatggtacttttgcttggacaatcatcggaccgctatcgacaccttcatcgatgtagtgaatcgtaacgcccgtttcagccacttgtgccgcataggcccgttcaatacttcgtaacccagaaaaggccggtagtaacgacggatgaatattgataatccgttgtgggtaggtatgcaacaatactggggtaatcacccgcatataacccgctagcaatatataatccaactgtaacggtgccaacagcgcgacaattgctgcttcatagtgttgtcgatcatcataatcacttaagcggatgaccgtcaccggtacatttcgttggcgcgctttttcaatcaccggtgcgcccggctggtcacacactaagttcataatctccatgcccgctttttttaaggcgtcatcatctgcaagtacttcaaagttagaacccgttccagaagcaaaaatcgccactttcatctcatcaacccaccaattctattgcattttcttgtcgcggtttaaccgacccaattcggtaagcctgttcttgttcagcgttcaattgggcgagaacttgtgccgctttttctggtgcgacggctaagaccatcccgatccccatgttaaaaatgttatacatctcgagtgcatccaattgcccatattgtttaagtgccgcaaaaatcggtaagcttggccatgttcccaattgaatttcggccatcacgttgtcaggcaacatccgcggtatattttcaataaagcctccaccagtaatgtgggccgcgcccttaataaagccttgttcgatcaacggctgacatgcttgtgtataaatccgcgttggtgttaatagccattcaccgagtgtctgaccaggcaattcgggtaagtgactgtcgacggacaacccatgttgttcgaagaaaatttggcgcacaagtgagtagccattcgaatgaatcccactggacgcgattccgattaatacatcccctgtttgaatcgtttcaccagtaattaattgagcttgatcagcaattccgactgcaaaacccgctaaatcataatgtttttcagcatacatacccggcatctcggccgtttcaccaccgattaacagcatgtcagcagcttggcagcctgcaacaacgccgctgacaatttgttcgatcttatccggctgcgtttgaccagccgctaagtaatctaagaaataaagtggcttagcgccttgggcaacaatgtcattgacacacatcgcgacacaatcaatcccgatggtcgcgtgtgcatcagctgcaaaagcaaccatcaacttggtcccgaccccatcggtacttgaaacgagcaccggattttcatactgccccatcgctaaggcaaactgaccaccgaagcgaccaatattttgattggttgcgccgacctgcttttgaatccgacgaaccacttcgtaaccggctgtcacatccaccccggctttttggtaagcatttgtcatgattgttgctccttatctgcttttaaacttgcctgataggcagcttcatagtcataaagtggcgttggatagtcgccgttgaaatacgccatacataatccggaatacggcgcatcttgctgtaacccaatcgcgtcgattaatccctgttcactcaaaaagccaagtgaatccgcgccaatcgtggcacacatctcagcaatactttgatgcgcggcaatcagttcatcacgtgtttgaatatcaatcccataaaaacaagggtacttcaatggtggggacgcaatccgcaaatgcacggataatgcgcccgcttctttcaaacgtttcacgatgtgcttgctggtcgtcccacgcacaatcgagtcatccactaaaacgattcgtttaccagccacaacacttttaaccacggcgagtttgcggtttaccccttgttcacgaagggattgcgttggttcaatgaacgtccgccccacgtattgatttttaacgaggcccatttcatacggcaaaccactttcctcggcatagccactagcggccgataacgatgaattcggcaccccaattaccatatccgcatcaactgcggtttcgcgtgctaactgtttccccattcgtttgcgggccgcatggacgttaatcccacagatatcagaatccgggcgagcaaagtagatatattccattgaacagattgaatgcgtggtttcggttgtgaagaagtcagaatgtaacccgtccgcatcaatcgtcacaatttcgcctggctgcacatctcggataaaagttgcttgaacggtattgagcgcacaggtttcactggccacaacgtagcccccgtttgctaaacgtccaatcgagagtggtcgaaagccgttgggatcaagcatcgcaatcaatgaatcttgcgttaataataggtaggcaaagcccccacgaatttgttgaagggccgtcttaatttgcgcgtgcaaatcaggcccttctgcacgtcgaatcagatgcatcagaatttcagaatcagagctcgattttaagatggcccccgattgttcaagcatgcggcgcagtgtgaccgcgttggttaaattaccattgtgtgcaagtgcgaattgatcggttgcaaaatcgaataggaacggctgaatattttctaaaccgtgactaccagcggtcgcataacggacatgaccgattgccgcgtccccggttagttgggttaagtgctccggtttgcggaaaacatccgccaacaaaccacgattgcgataacccattaagtgcccgtgatcattagtgacaatgccggcaccttcttgcccacgatgttgcaaactatgcaagccaaaataagtcatttggtttgcttctggactaccccaaatcccaaaaacaccacattcttcatttaaactttttatttcatttgacatggtatcgccgtctcccaacttaacttcgcttcagtcaccgataactcaacagttgattcagtcgtttgcacttgcataattggcgtggccgagaccgtcccaattaattgcgcctgatcttgacagaacgcttcaaacgccgtctgattttctggccgaaccgtgatgataaagcgggattgcgtttcaacaaataactgttgttgattaagggggacttgcacgcggcagccgagttgttctttaaaagtcatttcggctaacgcaaccgcaaaaccaccctctgataaatcatgtgcactagtcacccaccccttttgaatcgctgctaagacgcaatcttgactcgctttttcagtggctaacgaaaagccgcttaatcgtcctgcaactttgcccgtcaacatattttggagttccgaacccgctaaattcgtatccgtctggccaacgaggtagattaaatcccccgctgacttaaaaccttgcgtcgtgatgtcggctgtatctcgaatcaaaccgaccatcccaatcatcggtgttggataaatcgcttcgccattgaattcgttataaaaagaaacattaccagagatgaccggcgtatcgaaaacctcgcaggccgccgcaatcccttgggcactttgatcaaattcccagaatacctctggcttttccggattgccatagttcaaacaatccgtaattcccagtggttggccccctgccgcaacgatattccgtgctgcttcggcaactgccacttgcccaccgacttttggatcgaggtataagtaacgcccgttacaatccgtcgtcatcgcgagcgcttttttagtcccacgaattcggacgaccgccgcatcgcttcctggtaaaacgacggtattggtcttcacttgtgcatcatagtggctgtatagcgagcgtttgtcagcaatcgtggattggcccaataaatcgagccatgttcgtttaacatcattaatcaccggctgataaggcgccatcgctttaaattcagcgatgcgtgctggttcagtttgtgctttatgataaatcggcgcatcactcgttaaagccgccactggcaaatcggccactaattgcccaccatgccacaattgatattgttgactctcagtcacttcaccaatccggaccgcatccagatcatatcgttcaaacaaggcaaccacatctgtttcatgaccagctttaacacaaagcgccatccgttcttgcgattcagaaagcatgatttcataagcggacatctctgtttctcgttgtggcacaagatcaagattgagaatcatcccagtacctgccttttcagccatttccgctgttgaagaaactaagcccgccgcacccatatcctggatgccgactagccaatctggatgcttcaaaattaattccaaacaagcatccattaatagtttttccataaacggatcacccacttggactgctgagcgttgggtcgccttgccatctgcaaattcatccgatgcaaaagtggccccgtgaatcccatcgcggccggttttagccccgacgtagaacacactattgccagcaccacgcgctttaccttgctgaatatccttttggtcgatgacaccaacgcacatcgcgttgacgagtggattagtctgataacatggatcaaatccgatttcaccaccaaccgttggaatcccgatacaattaccgtacccgccgattccagccacaacttcttgaacaaggtatttcgtgtggtcatccgtcaattcaccaaagcgcagactgttcaaaagcgcaatcggcgtcgcgcccatcgaaaaaatatcccgaataataccgccgacaccggtggccgccccttcatagggttcgactgctgagggatggttatggctttcagctttaaagaccactgcttgaccatcgccaatatccaaaatcccagcgccttcacctgggccttgcaacacgtgctgaccacttgttggaaattttttcaaaaccggcttcgaatttttatatgagcaatgttcactccacatcactgaaaataacccggtctccgtataattcggcaaccgttttagaattttagtacgaatcaattcatattcatcatctgataacccccattgctgataaagcttggtggcttggatttctgccgctgttggttgctttaacacggttattgccctccttttcgaatcgatgtgattaatgctgcaaataaacgttgcccatcatcgctacctaataaggtttcgactgcgcgttctggatggggcatcatccctaagacattgccggcttcattcgtaacgcccgcaatattcgctaaactaccattcacatcattttgataagtaaatgcaatttggtggttcacttttaaccgttccagggtctctgcatcgcaataataattcccttcaccatgagcaatcggcaaccgaatttgttcgttcggcatatagtgttgggtgaacatcgtaccggcattggtcacgttcaacgcgactgtgtcacagataaaatgggtttgtcgattcggcaaaagaacgcctggtaataacccgagttccgttaaaatttggaacccgttgcaaataccgataaccggtttgccatcagccgcaaacgccttaactgccgtcataatcggtgccaacttggcaatcgcaccactgcgtaaataatcgccgtatgaaaagcccccgggcactaatacggcatcaaaacctgccaggctagttgctgtgtacgggatatactcagcgttttcatgacaaacatcttcaattgcatgatataaatcagcgtcacaattggaacctgggaaaactaatacggcaaatttcattgattcgtcgccaccttttgtatgtcgtagtggtattgttccatattaggattggctaagagttgatcacagatttgtacgacctttttttcaactgcggcttggtcatcgccagccacttgcatttcaaaggacttgccaatgcgcatgccgctcacaccatcaaagccaagtcgttcgatagctttttggacagcctggccttgtggatctagcaccgaatctttataagtcacttgcacacgcacattaaacatctgtagaaccccctaaaattttttctaatcgtcgtaatacgacatcgtacaccgatactaaatcccctttgttcaagcggaaaacatccttatctagcgattcatgcgtcgtttgatcccacagacggcagttatctggggaaaattcatccgccaaaatcaagcgaccgtcataccggccaaattccaacttaaagtcgattaaatcgatatccgcacggtcgaataaatcgattagcagctggttgatctgcttagtttgtttttcaatcacttcaatttccgccggtgtcacaattccaagcgcggtggcttgcgaaatattgatggctggatcatctagtgcatcatttttgtaatagtattcgataatcggcgtggccaatcgtttgcccggtgcttgaccaaacttgcgggcaaaactccctgccaccacgttgcgcaatactacttctaggggcacaatcgtcactttcttgacgagctgttcagttgctgaaatattctcgattaaatgcgtttcaataccatttgccatcaagtatttgaaaattaatttcgaaatctgataattcaataatccttttcccgtaatctgttccttgcgtttgccatttaacgccgttgcttggtccttatagaccattctcaacacattttgatcgtcagttgtaaaaacatctttcgcttttccagaataaaacaacgtctcactcatgcttgaatccctccaaataacatacattttatttaaaattaaaataatcgttcgtgttacattagggtgtaaaaaaactttgaaataacctcatttcaaagttttcatcattattcgcccaaaccaacgcggtcaaagatttctgcgacgcggcgaatatggtaatggtaatcaaacgcgtcgtctaaatcagcgggcgtcaacacattcataatccggtcatccgcttctaacaacggtctgaaatcagtttgttgatcccaagcttgggccgttttaggttgaatcaagtcataagccgcttctctcgaaagcccatgatcgattaacttcaaaagaacccgttggctgtaaatcaacccgaaagtccgccccatattacgcttcatattttctgggaagactgtcaagtccgtcataattttggtgaaccgtcgaagcatataatccaacaaaatcgtagtatccggtaagatgatgcgttcggcagaactatgcgaaatatcacgttcatgccagagtgcaacgtcttcatacgccgttaccatgtgtccgcgaatcacgcgtgccaagcccgtaatattttcagaaccaatcggattccgtttatggggcattgctgatgagcctttttggcctttcgcgaaaaattcttcgacctcgcgggtttcagatttttggagaccccgaatttcagtcgcaaacttctcgattgaagttgctagtaacgccatttcagccacgtaggcagcatgcaagtcccgtggtaagacttgtgttgagatttcttgggcgcgaattcctaaatgttcgcacacataggcttcgacaaacggtggaatattggcaaacgtgcccaccgccccactaattttaccggcttcaacgccttttgcagctttttcaaaacgtgccttatgtcgttttaattccgaataccatagtgctagcttcaacccaaacgtcgttggttcagcgtgaacaccatgcgtccggcccatcatgaccgtatcttggtaacgtttggcttgtttggcaatcaccgccaatagcgcatcgatatcggcccgcaaaatggcgttggcttgtttcaacaaataaccatacgccgtatccaccacatcggtcgatgttaaaccatagtggacccacttgcgttcatctccaagtgattcagaaactgctctggtgaaggcgacaacatcgtgccgcgtttcctgttcgatttctaagatccgtggaattgagaacatcgcattggcacgaattttcgcaacatcttcagccggaatgtgtccgagttctgaccaagcctcatccgctaaaatttcaactgccagccatgcctcatatttattctggtccgtccaaatcgcacccatttcaggatttgtataccgttcaatcatttattagcgtcccctctagtcccaaattttagtctttttaattgccgttaacgtttcatcaacagccggcgttaataacgtgacgtggcccatcttgcggttgaccttttgaaccactttgccatagtcgtgataatgccaatctgctgactgccgactggctgttagtgctgcttgccagtgctgcccaagaatattgaccattaccgctgattgccacaattgtggtgtttggagtggccagttgcagacgccccgaatgtgggttgcaaattgagaaaagtcacacgcttcaatcgttagatgacctgaattatgcggccgcggtgcaatctcattaacgtagagttgcccgtcatggccgacaaaaaactcgacacctaacgtgccgactaattcaatctgcgtggcaatttttgccgcaaccgattccgcttgtgccgctaacgccgctgaaatgcgcgccgggcagatgctgatatgtaaaatgttatctcggtgttgattctcgattgcgggaaaaacggcttgttgcccggctgaattctgactaattatgaccgaaatttcttgatcaaaatggaccatcgcttctaatacacaaacactagcggttaacaactgttgagccacctccatatccattgcggaccgtagaatgacttgtcctttaccatcatatccaccgcgcgtggtcttcaagatacaaggaaaaccaacttttttaacagctggtattaattctgcaggggtcgttacaatctcaaaggtggcatgtggtagctgttggtcaacaagaaattgtttctccaacaatcggtcttgagcaatccgtagcgccttcgtcccttgaggaatccatgtatattctcgggcagcttcaatcgtcttagcatcgacgttttcaaattcatatgtcaacacatcgacacgttgcgctaacatcataatttgtgcctgatcatcataagctgccacaatttgatcatccgcgacttgtccggctggacagtctgcctgcggatctaagataatcactgcaaaccccatctctttagccgctaatgtcatcatctgacctaactgaccgcccccaacaatcccaatcgtttgccctggtaaaatttggttagtcaaagtctgcattacttgccaccgcctttgcatgcatccgtgcttgatactgttgcagtgccacttgataagctgggacctgcaagccacaaatctgtgtcgctaaaataccagcgttaacggcccccgctttaccaatcgcaaccgtcgccactggtacgccacctggcatttgcacaattgataataaagaatccagcccactaagtgccttactttgaattggcacgccaatgactggtaagactgtattggcagcaatcatccccggcaaatgtgcggcaccacccgcaccagcaataatcgcacgatacccgttcgcctgtgcttcttttgaaaaggcgaacatttcatccggcatccgatgagcagaaataatctgtttcgtataactcacgcccaactccgataatacagaagcggtctgttccattgttccccaatctgatatagagcccataacaagtgccacatcactcatattctttgcccactttctcgttgttgattatgctttgattctaacaatcttcatctgatatgtcaaaatattttacgaactattttatataaatacatttaataattcgtatttaaatcataaatacacaaaaaaaacgattaacctgttggttaatcgtttttttatcgttatggcaatacaacgaagagtaatgcacctaaaatcccaccgatgattggaccgacaactgggatccagctgtatgaccagtctgaatcacccttgttggcaatcggcaagactgcatgggcaatccgtgggcctaaatctcgagccgggttaatcgcgtaaccagtcgtcccaccaagtgatagaccgattgctgtgataaccaccccaaccactaatgggttcaaaccggctgttaattcaccacgtgttaatgctagtaaagcgaagattaagacgaatgtcccaatcaattcactcattaaattggcaaatgggctgcgaatcgcagggccagttgcaaaagtgcctaagattgctgcttgatctttagtagcttgccaatgtggatagtattgaatccaaacgacaactgcgcctaagaacgccccaatcatttgggcgataatgaatggtaccaccgctgcccaaggggtcttgccaatcattgcaaaagcaatcgtcaccgctgggttcaagtgtgcaggtcccataaatgcagaggtatatacccctaaagtaaccgcaaagccccaaccaagcgtgatagcaacccagccagcaccgttggcttttgtttttgctaagctaacgcccgctacaacgccatcccctaaaagaacaaggataaacgtcccaacaagttcaccaagcgcctgaaccattattgaatgttccatgagatttcctccaagttaagtcctattttaaatagtctaattgtgcttcaacaattgctgaatccaataattctgtttgacgtgctttttcagcgtcatcccagttcaataaacgcgccatttcatcaacaactggttgtttgatggctgctaattgatcattgtggaataagatgaagtttgtccgtcttaaaagataatcaactggtgttaatgtcatttcttcgttaactgagtatcttaagctgattgtttctttcaagttcaagccttcagcagcaccttggtccgcgtatgaaacaacccggctgacgtttgaaccgaagcggtttgctaaatcaatcgcatcttcttcatcaatccctttgttcatcgcaacttttgcatagaatttaagggtatcatccacgttatttggatcgaagtgcccacctgaaacttgtaatttcttagaatcgatttcacgaactgtttcattgaaatctttcttcaagatatcccggattaattcaagcgcaccggctgccatcttacgataatcagtaatcttaccacctgataaagtgattaagccgttttcagccactttcaaatcactaccacgagaaacttgtgatgggttgactgattcttcagcatgcgccgttcttaattgactgattgctttttcaacatctgcacgagcagctgttttgttttcgtaatcatcaactgtcttgattaagttgttgaatgattcttctgaaaccttaccgctattagcgccaccaccgttataatcggagctaccgttattagaaattaatggtcgtaaacctgcccagctagcttcaatatcgtttaaagcgatattaacgctaggatagcgattgttgattgcttttaagaggtaatcaacgtctgcttgttcaacacgtgggtgtttgaaatcgcctgtgtaatcagtatcagttgtcccgaagtacgtcttaccttcgcgtggcacaacgaaaatcatccgaccatcatgtaagcctgaatcgaagtaagttggttgtggcactgataaacgactactatcaacaactaaatgaatccctttagtaggacgaagtgtttcttgtgctttgacttccgtgtttaaagcatttactttatccacccaagggccagcagtattaatgactaatttggcatgaatatcgaatgtttcatccgttaattcatcgtgtgctttcaaaccgtttacgcgaccgtttgcatcataagtcattccgactgctttaacgtgacttgcgattgatgcacctaattcgtcagcttctttaatattttcgatgactaagcgcgcatcattattgacgaaatctaaataaacaccagcacccatcaaacggtctgacttcaagccaggttcgcgttggagtacttctttacgatcaattgtatagttggcatattgtgtaccagttacccctgccaatttatcgtataaatccatggcaatcttgacactgaacatgtcgtaagttgcttcaggttcatcatagattggtaaaagcattggtgtaggccgtgggatgtgaggtgcaatcccttgaacaacggcccgttcactaacagtatctgcaacaaccccaacgtcgaaagtctttaaataacggataccaccgtgaactaacttcgttgaacgtgatgaagtcccttcagcaaaatcttgcatttcaatcaaaccggttttgatgcctgatgcagccgcttgaatagcaaccccagcaccagtgatcccgccaccgattactaataaatcaagttgttcgttctttaagttattaattacttgttgacgtccttctaatgaaaatgtcattataatcctcctcattcacgcattttatatggtcgatgtttgaaaacctttgttgcttcaactgcttgttgccaaccagcatagagatcttcccgttcttcttcaggcatttctggttcgaaacgttgcccaactgagaaaatatgcgccaattcgtctgtatcttgccagaaaccaactgctaaaccagccaaaaatgcagcccccattgcagttgtttctaaattagctgccttttcaatcgagctattcaaaatatctgcttggaattgcattaaatagttgttgtttgcagcaccaccatcaacgcggagcactttgatatcaatgccagtatctttttgcatggtttgaacgacatcccgagtttgataagctaatgattgcagtgttgccttaataacgtcttgtcggttcgtcccacgcgtaatccctagaattgaaccacgtgcttctgagtcccagtatggtgcacccaaacctgtaaaggcaggcacaacataaacttcatttaaactggttgaagccttagcggctgcttctgaatctgatgatttttcaaccagttgcatactatcacgcaaccattgaatggctgaaccagcaacgaagactgagccttcaagtgcatagttgactttaccattgattgaataaccaattgtcgttagcaagttgttttctgacattgttggtttttcgccagtattcatcacaataaatgaacctgtaccataggtgttcttaaccatccctggttggagagctaattgaccaaataatgcggcttgttgatcccctgccatccctgaaattggtaccgtgctaccatagaaatgataaggtgctgtttcaccataaatttcagagtttgaccgaacatcaggtaacatggcccgtggaatgtttaaaatcttgaggatttcgtcgtcccaatccaaatcgtgaatgttaaacaacattgtccgacttgcatttgtatagtcggtaacgtgtgaagcgctacctgttaacttccatgtaatccaagtatcgatggttccaaagaggagttcgcccttttcggctcgttcttgtgcacctggcacttgatctaaaatccaacgaatcttagtcgctgagaagtaagcatcaattaatagccccgtcttttgatggaataattcttcatgcccatctttcttcaattgttcggcaatgtcatttgtttgtcttgattgccaaacaaccgcattataaattggtaaaccagtttccttatcccaaataatagttgtttcacgttgattagtaatcccaatccccgcgatttgatggggttgaatccccgatgatataaaagcgtttgcaatcgtcgataaaacagcgttccaaatttcgtttgcattatgttctacccagcccggttcggggaagtactgggggaattcacgctgtgcatcggcgactttttgaccattgtgatcaaaaatgattgaacgagtactggttgttccctcatcaatcgccaaaatgtatttttcagtcatcttaatcctcctttaacaacaatgttaggaaaacgtttcctcgaaaactattatagattaccgatgtccaaaaagaaagcgttttacccaaattaaattttacacaatttaacatccttaccaattcgacatttgtagcacatccaaaattaaaaaacgggtcaataatctcagatcaacactaattaaagtccttcatctgaatcattaaacccgtttttttacttaaatcgttgcagttattttagtatataattcaccgttcatcttgctgagcgaaaccttttcgttcttttcgtttgaaaataacacgatatagattcggccaccgtggctaaatccgttcgacacattccagcctgacaaataaccacgattaacaatgagtgctggatcattgtaaaagcccattccatagtgggacgtactccctggttggaacatttgagccttactctgttcattaattaattttccagtccacaacgcgcggtcaaaacggtacatatcagtcgccgtcatatacatatctccgacccctggtagttgcgtgaaattggggagttgtcccgcagcgccatttgccagatagccaatggaagccgctggtaatcgcgaatattgatccgtcatgaaaccagtgtgcgccattttacttggttttagaattttttcttttagatacgttttgtaatcttgatgactcactttttccaaaaccttcgtcagcacaatatagttcgcatccatatagtgccacttgcccggttgttccttaatcccatttttaataatttcttcgattaattggtcgagagtcttcgtctgattatcttggtcccgaccgacaatgcctgatgtatgatgtaaaaaatcagtcagtttaatctgctgcccattcggaaagtccgggaggtaccgactgattggatcgttgacgtttagctttccttgttcttgtaactgcaataaactcgttgcaatcaacgctttttcagttgaaccaatcgcatatagcgtatctggcgtattcaccaactgcttggcccgattagcactgccgtaccccttatccaacaaaacttgcttatcgcggacaattaacgcggtacctgaaaagccaatttgctttaagtagtcatctaacgcttgttctgcaacaattgtcggttggctttctgctttaagtcgttcttcctttgctttagcagcagcgactttttgtgattcgcgctgtttctttgcttcttgcgcttgtcgttggcgcttaatcttggcttgttgttgcgcgatttttacttctcgttggtgatgttgtcgctgaaccacaattccgcccgctaccagaccgaatatgaccagaataccaatgacaccaccaatttgacgccctttttttgacatcaactgtccctccgaaatttctaatctatccattaatttattacaatattaatgtacaatacgcttttggatttgaacagtgacattattgtcatctaaccacacgcaaaaaagcggtcgcgacaaaaaatgtcgtgaccgcttttttggaaccagacgttcttatttaactaataaaacattcgttgcagcatgggcactaacatattgggcaaccgatcccatcatcattcgttcaataacccctttccccgtaatccccaacatgattaaatcaatcccatattcttcaggaatgcgaatcgcaatttcttttttcggtgagccgacttccagaatcggggtgaccttcgttagcccatgattattcgcgtaacgaatattagccgctagttgctccttcacacgatctttttccatcgccgtcatcttcgcatagacactagcatccggtgaaacatagactgtacttggaataatatgagccacataaagctcagcatcatttcttttcgcaacttcaacagcttccataaatgccttgttcgctaagtcagatccatcgaccccgactaaaattttcttatacgttgtaatcatttagcaacaccctcctattaatgaaatgaatgcgaatcctaactatatgttcatcatactgaacccaataggaccttgacaatttaactgcctaaacaaaagacatatcgttaatagctatagtaccgtcgatggtgcacgaattcgagttaaagaattggtatctctaaaaagcctaatatatactgaccctaagttaattaacgaaagcacttaatagctatctcatgcactcatttctaaatcaatcaacttaaataataatttgaaaaagaaaggactgtcacatatggatattgtaataaccggtggaacatctgggattggctatcgcattgccaaagatctcattgcagaaggccatcaagtcattatcgttggacaggatgcggcaaaaggccgggcttctgtggcccaacttggaaaagcggccttttttatccaagccgatttagcgaccaaatcaggacgcaaccaagcactggcaagcatcaaatataaagtggataaaatacacgttctagtgcacactgccggtgttttccccagctcagcagaagaaaatattaaggctaatttagtcccccattatcagctaacaatgggcttagcagaccgattaactggcggtcgcgtccttatcataaccggtgatccgcaaatcattcaacaactcagcatttgcgaagaacaggagactactttacaacgtgcaaggtggttattaacccataaagctttattaaccctctttctcagttattttctggctgaaaaagagattacggtcaattcatttttcccagggaatgtcaccgatgagctaccgcattattcccaaacattgctgcatactgaagtgccagttggaaaatacttagcactccatcccgatctaacgcagagcaccggtaatttttttgataatgatcgcaacttggtgttactcaatgctcggcaatacaactatgataatgccgaaaagcatttgttacagtatttaacagagtaattgagactataaaatcgcttatcattagtggcaacatgagaatattattttccactaaactaaaaaaggacctgagacagtttttgtctcaggtccttacttatttgattgtataaaaaaaccccgcggatgcggggcacaaatattaaagtttaacgatgtttgttgcttgaggaccgcggtcgctgtcttcaacatcaaatgatactgcttggccttcgtctaatgacttgtaaccgtcaccttggatagctgagaagtgagcaaatacgtctttgccgtcttcaccagtgataaaaccaaaacctttgtctgcgttaaaccattttactgtgccgttgttcataataatttcctcctgatacatatcaatgtacgttttttgttgcaataaattattgataggtaaaagaggaaggtattgtgcatccaaaactcaaattacgtttcaaaatttgattacttgaacagtatagcatggcattttctaattagcaacccgcatcccaaaactatcgactaaatcgctcgcaattcattcgcaaaaggctattaaaataggctttaaagcgcataaactttttatttaaatatttaatttctaatcattttcgaaccgttttgtaaactttgcctcgctaagtgccatcaattcctcaggctcaatttcatatttcgaacagataatgagcagttggtcgaagcaatcggctaactcctcttttaagttagcttgcttttcaacgtcgtttttaacttttttccctgggtgatcacgcccaagttcaatcgttctaacggcccgtgacaattccccaagttcttcactcaagaagttcaaccgaattaatggtgaaaatcgataccaattccgttgttgataaaaatcaactaaccatgtttgatgcgcttttaaataatcttgcattttacattcactccatcattaaaaaaacacctaacctcgcaagcaatgtgcgaaattagatgtctccaagaattattgaatgtcacaggcgagattcgaactcgcgacctacggtttagaagaccgttgctctatccagctgagctactatgacctcattgattgacggtttttgctgtcagaataccacacaacatgctatattataagcaattgaagtagtcactgtcaattaaaattcgcagaaatgagggaaaaacatgcaattaaatcagttttcacgcttaactaaatctcaatctgaacaaatcacggaattacagcgtattcatttactcccaaaggatttcacccagctccccttccaagtccttgcccaagatatttttcaacggctgttcccagaagcacatagtcaatcaacccagagcgggcaacttagtttattacaagccacaaccgaattaaatctaaccgcctaccttgaaaccattgatacttcattcgatcaagttgtcttctataatgtcgccctccaactcttgggttttgaaatgacaaccgattttgaacttgatcaacccactgcttttatggccgccacaaaactcccatttatcgatcaagcggcatttgatcagaccactttcatcgaagccctttatctcctattaacgacgcgtagccaaactgggttactttatctggatcaattggctaaccgtggtttttttgcagactggcaaagtgatcagccccaatttctcatcttcaatggtaaggtccagcccgttttcgataccagccatttaattcgagaagtcgtttatgttgaatcgagcctagatactgatcaagatggccaacgcgacttattagaaacgactatcttcagaccacgcgaaactgaagcaggcttaaaaattccggcactctacactgccagtccttactataaggggattaacgacgtcgatgctgatttgcacaatgttgatactacaattgcgactaaacccgttcaacaaccaagcttagctgatttaacccaaacgccaaccactgcaccgcttcctcaacctcgcgccgttaatggcacaagtatgacaactgaattaaacgcaacagatgacagcaattacagtttaaatgattactttctggcgcgcggatttgcgaacgtttacgctggcggcattggcacacgcggttccgacggcgtccggacttgtggctcacctgaagaaacagcttcaaccacggctatcatcgagtggttagccggtaatcgacgagctttcaccaaccgcaccgatggcattgaaattaaagcttggtggtgtaatcaccaagttgcaatgactggtaaatcctaccttggtactttagccactgctgctgcaacaactggcgttgaaggtctgagaaccattgtagctgaagccgccatttccagttggtacgattactaccgcgaaaatggcttagtggtcgccccaattgattgtcagggtgaagatgccgatgtcttagcgaagttgtgccaaacccgccaaaaagatgccgctgatcatgcgctctctggcactttcttcgccgaccaactcaaagccctgcaagaaggtcaagatcgcatcacaggcaattacaacgccttctgggcagcccgtaactatcgtgacaatctcgccaacctgaattgcgatgtcatcttagtccacggattaaatgattggaacgttaaactacaaaatgccggcgccttgtgggatttattgcgcgatcaaccggttaataagaagcttttcttacaccaaggtgaacatatctatatgaataacattcagtcgatcgatttcaccgatatgatgaacttatggttcacgcatcaattactcggcgttgagaatcaggctgtcacaaaattaccggctgttacaattcaagacaacgcacaagaagccacttggacgacccaggcggattggctagccctcgacaatccaactacgactttctggctaaacgaacaaacattaagcactaatgctaccgaaaatgccccactgacgacttttaaagatgacggtgttgcggcctttagagcccaaaaaatcagtacaaccgcttggcaagatgccttaatcgcagatcaatcaagtttcactggcaaccggttgcgtttcttaggcttcccgcttaccgaaccgctcattattgatggccgaattcagtttagaacaagggtcgctgtcaatgccgaacgtgggctattgagcgtgctggttattgactatggtcaattcaaccgtttaggcaccacacctgctgtattagctgctaaaggccaacaactcggctatcagtggcgctatgatgatttaaaggaatttaagctcaatcgaccaagcaattatcaagtcatcactaaaggacacatcaatctccaaaatcgccacaatagttatcaaaccgacgccgtcaccccaaacgaattctatgatatcacactcgacctacaacccacccattatgatttaacagcgggacatcaactcggtctattagtctacgcgactgatatgggaatgacgattcgtgaagagcaagcattcgtttaccaagtcgacttggctgctagccaactgattgtcccccatctaaatgattaataaggagtctttttataatgtcaaatctcatcacctgtcgtcaaaccctctccatcagtaaccatcgcgtcttcgtcaatgatttgaacgaacatgaaacggtctatggcggacgcttgcttgaactcttggatggttcggcgtccatttcagctagccgcttagcgcgcgtcgaaaccgtcaccgccagcatcgaccaactgaacttcattgaaccattcaaaatgcaagattccttgtgcatcgaaagttacgttgccggtgtcggcacccgttccattgaaatctttactaagattatcggtgaacatctcaagaccggcgaacgattcctcgggctaactgccttcttaacctttgtcacaatggaaaaaggtccggcccttcctaacattcaacccgaatcaccggaagaacggttcatctgtgccggttatgaggaacgaaaagcccaccgtctcgcaaattttcaaagtcaaaaacatttcaatcaaaatatcagtaccgattatccatggaacggtcaataacgaacaaaagaggtgtcgattatcatcatcggctgaagtgaacccccgatattggaccaaaatccaatatcgggggtttttatattgaccaaatattctaaaacattaaaaataaaagttgttcaggattatctaacgtcatccttaggttatgaattaatagcgagaaaatatggtattaagagtaactcactagttgtctcgtgggttcaacgttataaggcctttggcccaaaaggactagatgtcctatcacccgaaaaaacatttgatacctcctataatttttattttatcataccatttaatactgcatactagttaaatctctctaaaaatttctatccaaatggtgttacttttggtgttactttctacatgcacaaacaaaaaaagccagaaacgccttcaaataggcatttctagcttatgcaattcaattaccccacactgccttccatttcataactaatcaatcgattcaattccaccgcgtattccattgggagttccttggtgaatggttcgacgaagcccatgatgatcatttcggttgctttggcttccgagatgccacggctcatcagataatagagttgttcttcagaaattttagagactttggcttcatgttccattgaaacgttgccgtttagaattgtgttgtacggaatcgtatcagagctggagcggtcatccataataatcgtatcacattcgacatgggcaaacgaaccgtcactgtcgcgttcaaaacgaacagtcccgcggtaatcaacggccccgccatctttggcaatcgattttgaaacgattgaggatgacgtattcggtgcggcgtgaatcatccgcgcgccactgtcttgatcaacgccttcgccggcgacggcgattgagagcatggttccgcgggcaccttcaccatcgaggtagacacttgggtatttcatggtcatcttcgaaccgagattcccgtcgacccattccattgtcgcattttccatggcttgggcccgtttagtttccaaactataaacgttctttgaccagttttgaatggtcgtatagcggcaatagccatcccgtttcacaaagacttcaacgaccgctgcgtgcaagctatcacttgaatagcttggtgcagtacagccttcaacgtagttcacgctggcgccttcatcgacaataatcaatgtccgttcgaattgacctgaattttcggcgttaatccggaagtacgattggattggaatatccgtccgcacgccttttggaacgtagatgaacgtgccacctgaccaaacggccgagttaagcgctgagaatttattatcagttggtttgaccaacgtactgaagtattccttcacaatttcagggtattcgcgtaaaccggtatccatatcggtaaaaatgatcccaagtttttcgaattcttcacgcatgttgtgataaaccacttctgattcatattgcgcactggaacctgctaaatacttacgttcggcttcaggcacacctaagcgatcaaacgtttctttgattttgtcgggaacatcttcccaatcgcggtattgcttgtccgttgccttttgataatacaacatgtgttctaaatcaagatcggataagtccggtccgaaatctggcattggcattttttcataagcgtgaaatgattttaagcggaaatctaacatccattgtggttcctttttctcacgcgagatggcgcgcacaacgtcttccgttaaaccgcgcccagttgaaaagacgggctctacatcgtcgctaaagccgtagtcgtactcttcaaattggggcatcgttgtctcttctgtcattcgttagtttcctccgtttctgcgtggttcatcatttgaccggttgttgcacgtcggtcatcgctatttaaggctttgtggagcgccttccaagctaaagtcgcgcatttaatccgcgcagggaattgttgcaccccttgtaaaatcgcggcatcttctaacaatgaccagtcttcgtcacgatcaccaatcatcatatccgaaaagcgttcgatcatcgcctccgcttgcgccggtgtcttatgcatcacggcatcggtcatcatgctggcagaagcctggctaatcgtacagccttcccctgaaaaagcaatctgactaatctgcccgtcttcgagcaccagttcaagttgtaacacatcgccacaggtggggttgcgtaattcaatttcatgatcggcagtcgtcaagtgaccatgatgatgcggatgttgcgaatggtcaagaatgacctgccgatataagttatctaatttagagagtgccattttggaaaaactcctttgctgcttgaatggcggtcacgaacgttttcacgtccgcttcggtattgtagaggtaaaaactagcgcgcgcggttgcggcaacgttcaaccattgcatcaacggttgtgcgcagtgatgaccagcacgtacggcaacgccttccatatcgagggcggtcgctaaatcatgtggatgtaaattgtcgagattaaaggcaatcacaccggtgcgttgggcggcatcttgtgggccataaatcgtgaggccgtcgattgcttggagctgcggtaaagccattgtgactagcgcttgttcatgggcttggatatgatccatcccaatttgcgttaaataatcaatggcggcccctaagccaattgcccccgcaatgtttggcgttccaccttcaagacgccacggtaattctttaaacgttgaagattgtaagcccacaaagtcgatcatctcgccgccgtattccacgggtggcatctgttcaagtaatgcttgcttgccataaagcacaccaatgccggttggtccaagcatcttatgccctgaaaaggcgtaaaagtccgcatcaagtgcctgcacatcaaccatcatgtgcggcacggcttgtgcaccatcgaccaccatgtaaccgccttgtgtatggactaaagccgcaattgttttaatcggattgacaaccccaagtacgttggaagcatgcgccaaactaacaattttcgtcttaggcccaatcacctggcgtgctgactctaaatcgatttgcccatccggtaataagtcgatgtaacgcaatttcgcgcccgttttctgcgccagttgttgccacggcacgagattactatgatgttccatcacactaatcacgatttcatcgccggcttcaaccacggttgggccgaaactgcctgcaacccagttcaaactttgcgtcgtcccttttgtgaaaatcacttcggcactcgcagcggcatggatgaaggtttggaccttcgtgcgcgcggcttcatactgggcggttgctcgttcagctaaagtatgcacaccacgatgcacgttcgcattgtcattttggtaataagccaccaaccggtcaatcacggcttgtggtttttgggtggtcgccgcattgtctaaataaacaagtggttcatcattgacgatttggtctaaaatcggaaagtcgcaccgataatcatttaactggttgaccatcgattaacttcctttcaatcgtgtccgttaattgttggcgcacgtttttatccggaatttcacttagaacagcgcctaagaaaccacgaattacaagtcgttgcgcgacttcttttgaaagaccgcgactcattaaataatacatttgttgttcatcaacgcgcccgacactggcagcatggccagcttgcacgtcattttcatcaattaataagagtgggttcgcatccccgcgtgctgtccgcgataacatcaagacgcgattttcttgttgggcatcggcacccttagccccttttaaaatatgcccgatcccgttaaacgttaacgtcgcatcttctaaaatgacgccatgttgcaagatgtgcccaattgaacgcggcccaatattcgtcacacgcgtatcaatcccttgaatctgtttaccagttgagatggcgaccactttcgtttcagcatgtgatccagcacccactaaatcagaatcaaagtcaccgatgatattgccatcattcattgatcccaatgcccaatcaatccgcgcatcgcgcatcaagtggccccggcgattcaagtaagtcgtcacggattttccaaaggcatcaaccgctgaaaaatgaacgtgactgttatctttagcaatcacttccacgacaacatttgctaagttcttgtggtcacccgctgtttggagattttcaagataactaaattcactgttttgttcggctactacgaggacgtgatgaataaaatcagcgggttgagtgctgtcctgtacataataagccgtaatgggttgcttaatcaccacatttttcggcacatacaagaagagcccactgttcatcaaagctgtgtgaaaagccgttaagcgatcctcgttcggtttcactgtgacttgcatgtagtattgttgtaccaaatcaggatgttcttgtaacgcggtgaaaatgtcggtaaaaatgacaccttgttctgccaattctgccggtaaatttaacttggcagttgtctgaccaatctgtactgcgtacggttgatcagctgaaagattcgctgccacagatggcattaaactcaaatcggatttaacggctgttggcgcatttgctgccatcactggccaatgtttatagttaattttttcaaagataggcagttcgagttgctcaatttgcgcaaacgctgcttgacgcatttcagcaaaccaggccggttcttgatgcaattgtgagaatgacgcgatttgttcaggcgtgatggctaatgttttcttcatcagaatcgccccctatttactttcgtcgtcagtcagtttgatatccaagcctaattcgtcacgaatcccgacataaccttcgtcttccaaacgttttgcaagtgacgcatcaccagtcgtgacgattttgccacccatcatgatgtgcacataatctggcacgatgtagtttaagagccgttgataatgtgtgatgattaatgagccaaaatcagccccgcgcatttcgttcacgccttttgaaacgacttgcaaggcatcaatatcaagtccggaatcaatttcgtctaggatggcgaatttgggttcaatcatcatcaattgcagaatttcattccgtttcttttcacccccagaaaatccttcgtttaagtaacgttctgacatttcttccgtcatatccaagaatgccatccgttgatctaattttttcaagaaagccatcactgaaatctgatcatcttcagcccgacgtgcattaatcgccgcacgcatgaattcagcgttcgttaccccttgaatttcagcaggatattgcatcgccaaaaataaccccgcacgggcgcgttcatcaaccggcatttctaaaatattttggccatctagtttgatctgaccttgtagtacctcatacttgggattgcccataatcgtttccgaaagcgtcgacttcccagtcccgttaggtcccatgatcgcgtgaatttcacccgtgttcatttccaggttaacaccttttaaaatttccttaccgtcgatgccgacgtgcaaatcgataatctctaatttagacatagatgaccctccaagaatcgcattctagcaattattatacgctcttaattctatgctaattgagaactgttttcaatgcttgaatgcatgaaaaaagaccacgcggacaacgtgatctttttcaatagattcgcacgggaaataggttaatattactcattgatttgatactcttctaaaaccgttgagccatttggtcagccacaataccggttgaactactcattgatttgatactcttctaaaactgctgtaatgccggcaaagctaaggccaacgttgaactactcattgatttgatactcttctaaaacatgttgaaacgtttaaaaactctgctgtttgttgaactactcattgatttgatactcttctaaaacgttgcctattacgtaagtcaggaatgacccgttgaactactcattgatttgatactcttctaaaacattgccaatcaggctctttcttgtagctacgttgaactactcattgatttgatactcttctaaaacagaatatccagatgatgctgatgtggctgagttgaactactcattgatttgatactcttctaaaactagcatcatattcaaacgcgtaaataataagttgaactactcattgatttgatactcttctaaaacttgcgttcagataactgtttaattgcttctggttgaactactcattgatttgatactcttctaaaacctagaatgtcggcaatagctctaatcgcctgttgaactactcattgatttgatactcttctaaaaccttatcctgataaccacgccttaatcctgtgttgaactactcattgatttgatactcttctaaaacactcaatgacgttagcacaacgtacagattgttgaactactcattgatttgatactcttctaaaaccagcgttcgagattttattggttgtgctctgttgaactactcattgatttgatactcttctaaaactctgaaacaggcggcacagatgatggcgcagttgaactactcattgatttgatactcttctaaaactgaatttagaaccagattgaaatctttggagttgaactactcattgatttgatactcttctaaaaccttttttacgggcgcgtttatttggcaaaagttgaactactcattgatttgatactcttctaaaactgtactaactgaaaaaataatagcgggtaagttgaactactcattgatttgatactcttctaaaacttaaatacctagcctacattgcagtaggcagttgaactactcattgatttgatactcttctaaaaccggcaatccttttaaatccagaattaactggttgaactactcattgatttgatactcttctaaaactacacaagttgcggataccaaagctggtttgttgaactactcattgatttgatactcttctaaaaccgttggcatagatagttaccatatcagccagttgaactactcattgatttgatactcttctaaaacaagtatagtcaactatatagctaccgttaggttgaactactcattgatttgatactcttctaaaactctaagtaattcatcggcatccatcccgatgttgaactactcattgatttgatactcttctaaaacagaacaaaaagccattatgtctgttaaagggttgaactactcattgatttgatactcttctaaaactgcagaaagagggggattcacatgaagactgttgaactactcattgatttgatactcttctaaaactctaagtaattcatcggcatccatcccgatgttgaactactcattgatttgatactcttctaaaacaagaagactgcgttgacgacattagtttgtgttgaactactcattgatttgatactcttctaaaacatacgtttcgcaatccgtaccagttccggggttgaactactcattgatttgatactcttctaaaactgatgaagcatcagcgactaagttttatatgttgaactactcattgatttgatactcttctaaaacaggaatactcatggcgttattttcaggactgttgaactactcattgatttgatactcttctaaaacaagtagcccaaaaatacgaaattagcgttggttgaactactcattgatttgatactcttctaaaaccaactgctagaccggcaaacgtttcctgtcgttgaactactcattgatttgatactcttctaaaactgatttgtatatcgatgatgagtatgtcaagttgaactactcattgatttgatactcttctaaaactaattcaatcgctttaagcgataaaattaagttgaactactcattgatttgatactcttctaaaactacagaagcacaagctgggatgaatgccttgttgaactactcattgatttgatactcttctaaaacaagagtccacaattattgcgctcaacagatgttgaactactcattgatttgatactcttctaaaacagctggcgcatcgattaaggaagtacaagagttgaactactcattgatttgatactcttctaaaactcaaaatgataaatatactgatcaaatccagttgaactactcattgatttgatactcttctaaaactagtgcaactgtaatcaatgcagatttagagttgaactactcattgatttgatactcttctaaaactcgtgcgggatagaaatttggaaatcaggggttgaactactcattgatttgatactcttctaaaacaaaagactagcatcgctttgctttgttttagttgaactactcattgatttgatactcttctaaaactaccttttggaacgattttgaccaggaaatagttgaactactcattgatttgatactcttctaaaaccggtaatactgatggatttaacgctggttagttgaactactcattgatttgatactcttctaaaacatacaccaacatcaatattattaataataagttgaactactcattgatttgatactcttctaaaacagcagttatgtttacttgggcaccattatagttgaactactcattgatttgatactcttctaaaactacttcccgatcatattcaaatgaggtgatgttgaactactcattgatttgatactcttctaaaacagttgccccgtactctgaaacgaacggtaagttgaactactcattgatttgatactcttctaaaacttgctggtcattatccttaactgaatctaagttgaactactcattgatttgatactcttctaaaactatagttgtccgcatctggtttaactgtcggttgaactactcattgatttgatactcttctaaaacattataatacggatgtgttataatatacttgttgaactactcattgatttgatactcttctaaaacagaagcactttcgtctattaatttttcagtgttgaactactcattgatttgatactcttctaaaacttagttgacattgagggcaaaacgaccgaagttgaactactcattgatttgatactcttctaaaacaattgagttagcacttcactaaattccattgttgaactactcattgatttgatactcttctaaaaccgtcgttttttcatcagaatttcattttattcatagcgccattcgacataatcattatcgatgtgataataacaacatttctggtactgatcagatttaacctcttctgaaaattcaatgagaaagagtttcacattcaatgtcgccaccaacctcaccaattcattaaattggttgatactgagatagtgcgaaacgttgatcaacgtgattatttttgattcatttaactctactgctgtctgtactatactctcaattataccatatgggtcatgttggacgacagtcgaaaattgtaaattatagaacttaatcattctttgaagatcccattcctgattgacatctaaggtcaattcatacataaaggccgcatccaaaatcgttgaacgaatctcactatctaactgagttaatttctggcgctgctgatccgttaagtcggcggcgaattttttaatcaaccgattttgaaatagatgattcaaattaattgctgccacatccccaccccaaataacagcctttgaataatccattaattcgtattgatcattgctaaatttaacggtctcttgtgcgccggacattccaataatgagtttggtatacacttctggactgcttgtactgcaaaccgttattttcttattctgaacgctaaaggggtggtatggataaaaagtaatgttcataaaattaacgtcctctcagcagaattacggacgtcatcactcgattcgcccactaagaaatgcattttattatattgttgttcagtaaccatcaacgtttgtactaagcctgcaggcggagtaaagccagcaattcggttctcgataaactgcgccgattgtttgctgacacaaactcgaacataaacagaatattgaatcattaagaaaccttcgttaagcagcgcttttctaaaatgacggtatgccttgcgatcctcgctcgtttcaactggtaaatcaaacatgactaataagcgcattattcggtacctcgtgagtcattaccacctttacttcaaactcttctttcggagttgtcatgaatttcaaacaattctgtacgtgtttagtgagtgcgtttctaagaattgtgatctgtccattatattctagctcaagattcagtaactccactaaaccaaatttaacatcaggggttaattcattaaacttttgatgtgccacccaataatcaatcactggtcgaaaaggttccattagatcggaacccaaattaaaatcactgacgccattgtgatgatgaatgccaaactgtgttaaatagccattacaaacaatttcgcgattaacggctgataacaacaaactataaccataattaagggctgcattaatgggactgtactccgttcgaacaaagtctttatcaaaaactaactgaaaatacttgcgcgcaatcacggcttctcgatttgttcgatcagcaaataccattgcatcagcttctgttgttaagtcttcaatatcctttcctaacaattgtgcacattgaatttgcatcgctattttggcttgaataatcgccgtccataaggtttctttcaaccccgttccccattcaacctgttgttgaatcgacgcgagactacgatttcctggataatccgcaattgtctcgcaagttggattaccgtctttgcctgtaaaaataatcttagcgccagcttcactcaactcagtaattgccgatgccgttaaaacggcctgggtagtcgcaactaacaaaatttggatatcatcaattggtacttggtgtgttgcatcttttgtctggacaacaatcttccgtccagaataagaaacctttgcatgttgtgaaatcacaactgttcgccaactcataaaaatttaccccctacatccttgttttcaaaatgataacatgctataatgctgttgttgagcttgatacactcaatcgaaatactcattgatttgatactctgagttaaaatcaaacaaggtcttcggaccaagttttctattctgagcctcttatgaggcctttttttatgccttcaaaccaaaaagctagcccatcattacactaatgacaggctagctttatttatttataaatcccttaaagctactcgtcgttcgaataaaccggttggagattgatagataatttgggtatcaggtgaaagagaaatccctgatggttgctgcatttgacctagtggcgtacttattttcaacacccctaagtcgataactgccgcatttgcatgtaacccaatcaagattctatctaatatgatctgttgaccaatctgtgtcatcttattaccatcccattgactcttccatggtaacttcataaaggctgctttacccgtagataatttagctctgaattgattagtatcatacagtgggaaatagtgcatcacttgatctaagatttcatcataaacttgttcagcaagttcttcagactgtgttaaaggtagcgcgccatttaataacttaacagccgttttatcaagaatcaattcctgctcattgtgtttatacgtcgcagagcccaatgtcaattcttgaccattatcgaagaaacgttgattgattaggatatgtggtgcaatgacttcgaattcttctacggcctcaatgatattacctttttgtttcttcacttttgtaaattgcggactaattttttgctctaagaatgccttttgtgaatcttcatccgtcagttgtttaagttgcgctaaccaactcgtctcaacaccacagactttatagagatcaccctttttatttttaatgcgtacaatacacatgtaggcaactgtcttacctgagtaaccaccatagagcgcagttgatcgatcttgcttagctggaatcaattgcttcccgccctgaccacttgctttatcatctttagccgcatagagcgtttgattaaatagcgctcccgaattttcatgcactccgcgggtcactagaatcttcttaaactgatatattttattcaaataagctagaccggattctttatcccaaataaccgcttcagtattttcatcaaccaattcgtctttctttagaccatttagaaaattaaagttacgccacttatcttgctgacttgccttctgatactcaccgtatacaaaataaggttttaatttaggatagcgcttcaatagatacagaccaacgaatgcggtcagataagcatcgaatgcatgatgatggttatttagattacgatttttcggaaaatcaaattctgttcgcatttggtgggttaacccactcttaaccgtaattaactcaatattatcttcaccatattgttccatcaatagatttgtcgctaacttaatgacttggcgtgtttctactaattgccggttaataaaacccttcattgcgtatttactgatatgatccggatttaacgttaaattatcatattttttcttggtaattaacccagcacgcaacatttgttcccattgaatctgcatcttttgtccaagttcgacacttgtaaagtcggtcggtacttgatctgctttactacgattcattttttgagaaactaatacccgattatctagtgagttatccttaataaacgactgtggcaaaatatgatcaatatcgtacgtcgataaacgatcaatatttaacgaatcacccgtatacatatcccgaccaccctgcatgaagtacaagaataagcgcgtattgctcaatgcagaattcgataaatccttaagttcatttctgatttcagtattatttagcaattcattgctaatattttgatagacttgttcaacttggcgcttacgttgcaccgaaagtcgtggattcacttcatcttcgcgcgcaaattcaatcaatatccgttctggcgcttggcctttcatggccttttgaatgtcattgacaacaagcagaatctggcggagcgcttttttattctgtggtgacgtatataaatcattgataacatcttgtacatcattttcagctagcatcatttgattagcttcagtaattaatttatcaaagtcttcagagtgcacaatccgcatgaagttatccgttgtatcccagagtaagtccatgattcgttgtccattcgcattgacgatttgcgttaataatttagccgacaaacgaccccaaccgcggtagcgtttagcagctaattgcacacgttgctgatctgttaaccaatcgatttcattcaatttggcgctatatattttgccgtcttcaaaaatcgttgaccattcaacacatttttccaaatcgacttgtttatcaacatcttcaaccgcatccccaacaatcgcctttaagtcatgatacgtgcttaatcgactattgaatttattctcatcagatagaccagtaattgcgggacgacttgcatagcgcttttctgataccaagtaatcctgaatatttttcactgatacacttgttttttgcataaataaatccgtaaatattgcttgtttcaactccgtcgtaatcggttggtcatcaatcttaagtccgtttaattcattcaacacttcaaaccgttgataaattaagctctgtttagggagtacatcttcagccaataaataagtatcagtcgttgtcatgcgcttaatgaattcattagcggatgcttgacggtccactttatcatcgaagttccacggtgtaatccggccttctgatttacgaatcagccacgcaaatttcgcatcggagctttgtcgttgctgctcagccgtaatcaggggccccacatagtatggtactctaaaggccactaattcgtccaatttatatttagcgactgtttgccgtttagaattgggattaagttccgctaaccaggggtaatattgttgttggttctcgataatccggtctaattcctgttgatgtagttgatgcgggattgccccattatctttggtccgttgttttggcataaattgatcaagttcaattaattttttaatttcactcacaatcggatgatctgggttgttctttaaggcttttgtgatatctccataaaaatcttccttcgaataggccttcgtattttcttgaccatcaacatattggtcataagcctgctttaatctctgtcggtcttcaggtgctaacgcttcccgtaccgcttttagcatttttaaatgcttttgatgatcgtcatacttcgtgatcatcgcttgcgacaatgattgattttcaggaacgattcccgccaatagaacaccagaataaagttcctgtaggctttcgataatttgatgggcattatcatcaagactactctctaacttgaccatttcttcatcaaagttttctgcattaaaagtgagtgtccatgctttaacatcttcggcttcgatcccagtaagcacattaaacttcgcttttaaccccaagattgcttttaataattctgtcgcaatcgccttattctgcttttcaactgccttattcgtacttggcgtataaatcagtgataatgcttgtctttgccgattgctagcactttgttgattatccaataagagcgctttgacctccgctaatttatccgtctctagttgaaagccagattcactgaacaagtcagcaaaaatcgtgtttagtctgtcaaaatgagccactaaattaatttcgctactcttaaaggatgagacgggcgcttcatttaaaaagtgcccgcgatacttcacaatatgatgcatcgctaaataaatctcgcgaatatcaaattgacgtttctcggtcattagcttatatcttaaatggtaaatcgttggataatcgtcatagaatgcccgatctgttcgatcattaaataaacttgtctgtggatataactttcgctgatccttcggacttaggtttgattgtttttgccgcaagaaaaaagtatcatcaactggcgtgatatagggttcaaagatttctcttaacaatcctaaccgccatttacgtcgttttaatcggcgacgtgttgttctaaagctgcgccgttctgcggctgtttgtccttcatcgtataaacgaaccccataaccatatttacctcttacactgaccaacttactttggtcatcaaccactgaccacccaattgaactagtaccaatatctaaaccaatattatacggacgactcattcttactccccctaaaagtttatattcaatgatagtatatccaatttaacccgctttttccaattaaattaagaattacacatgctaacagcaaaaaaagacaagtcttaatgacttgtctttgatcattattcaactggtaacactgcgccgtgccatttattcttaatccattcttgcgttgattttgatttgagcgctttaacgagcttcttgatagctgggttattgcggtcttttttatttgtcacaacaatgttggcaaatggcgaagattgcttttcaagagccacagcatccttttcagggttgagaccggcttgcacagcatagttcgagttaatcgccactaaggtgccttcatcattcttcaaaagttcaggcatgagttttggttcgaatgtgtactcaaacttgaggtgtttgggattgctagcgatgtctttaaacgttgcgttttcagcatttacgcccgatttcaaggtgattaagccaccgtcttttaaaattgttaaaacacggccccagtctggctggctgcttgaaactaatactttcgcacctgatttcacatcactcaattttttaacttgtttactgtataagccgagcggttctaagtgaatactgccaacactgactaagtcgtagccgttatctttattggccttcttcaaaaagggtttgtgttggtagtagttcgcatctaattcgccactcgctaaagctttattgggtaaaacataatcgctaaagacttttactttgaggttgatgccttcttttttcaactccggttgaacgtgtttcaaaatcgcggcgtgtggaattgcggatgccccaacgacgattgtgttgctgtctgacttcgcttctttgttaccacaagcggcaagtgcgcccgctaataagaagactgctgctaataatcctaaactgtgttttttcatgaaaactcctccttttaaattaacgatgatcaatgtgttgaacaaccaagtcgcccgttttttgacaaatgaagacgatgattaaaataatgacggttgcgactaacgtaatcgcattttggttagcttggaacccatcttggtaagcaagatttcccagcccaccggcaccaatcacccccgccattgcggtataaccaacaagtgaaattgcggtgacagttaagccggaaacaagcgccggcatgctttctggtaaaaggacttgccagacgatttggacttttgaagcgcccattgaacgggtggcttcaagcacaccgccatcgacttcccgaaaagctaattcaacgagtcgtgcataaaagggcgcggctgagatgattaacgctggaatcgcagctttcgggccaatcatcgtgcccatcaagccttttgtcaatggaatcaacaagacgattaaaatgatgaatggaatggaacgaaagacgttcactaataaagccacaatgccattcaacagccgattcactcgaccaccactcgcgtttgtttgataaagaactaacccgagtgcgaatccaagaactgccaccaataaaacactgacaattgttaaccaaactgtttcaaaagttgcttgccacatacttggccagttcacttgcttaaattgaaaataggattgaaatccgtttacgttatccatgacgtaccacctcaacttcgattgtttgttgtgctaattctgcaaggactgcctttaaatcacttggattagcttgaatttgaatgtataaatagccaagtgcgccattaatggtttgttgtaaactcccactgatgacactgatttcgactgctgggtattgacgcatcaagcgaccgatcaccggttgactcgattgttcttcgttaaatcgcagttggacgattgtaccatttggaacccgttctaacagttgatcaatcgaagcggccgtttcactcggtgataccactaaggattcagcaacaaatgccttggttgcagccatttgtggtttttcaaagatttcgtgcacagtcccttcttcgattaaccgcccattttccatgaccgcaattcgttggcaaatccgccgcaccgcatccatttcatgggtgacaagaacgattgtaatccccatttcacgattaatcttagccagtaacgttaagattgaattcgttgttttcggatcaagggcgctagtcgcttcatcacataacagaatcttcgggtcactaatcaaggctcgtgcaattgcgacccgttgtttctgaccgcccgatagttcgcttggataggccgcttctaaatgggtcaattcaacaatctttaataatgcgcgggctttgatttgtcgttctgccttaggtaccccggctaattttagtggcaacatgatgttttctaacaccgtctttgaccagagtaagttaaagtgttggaaaatcatgccaattttctgccgaatcggccgcattgcttgttcgctcaaccccacaattgactggccctcaacgagcacatccccagtcgttggcttttcaagtccattcaagagtcggatcaacgtactcttaccagcgccggaataaccgataatcccgtagatttcgcccgcttcaatgttcaacgagacatccgttagtgcggcgaatgttttttgttctcgctcaaaggttttacccacttgttttaatgtcaacatactaatcgctccctcttcttttaaaaaatgccaaaaaaaaatccttcctctcaaataaatgagagaaaggacgctaaatgcgtgttaccaccttaatttacgattacctcacagtaatcgccttacaaagtacccgattgatactcgttcgctatatcgggcaacccccgcattcggctcagttaaaccttaccaaatgaattgctcaaagaccatattcatctagctttcacattatccgcttgcacctgaccggactctcttaaaatgctactgactaaattactcatcttttcatcgcttgtattaagtagtacctatcataattaaagttcaattaaaagtcaagcaagactattcaaaaaaatcagattattgtttaagtaatggcctaatcgacccgaatgtcagcaatccacgcatctttttcgttatctgcatttaataattccggattatcagctaacggtgtgttgacgtttactaattcaccagctagtggactgtcaagatcttgtaccatcttctcagcttcaatggccactaaggtttcattagccgtcaatttttgccccacgattggaacatcaacaaacttgattaacccaaactcattttgtgcggctttggtgatcccaattcttctaatcgatgctgcaatttcctctgtccaaaaataatcattattattcatcgtcatccgtcattcactcctagaaagtatcttcagcttcactgaacatgtaactcttataatggtaccgcatcgacatgataaacccaacgccaattaggttccccaataatgacgagcccccttgtgagatgaacggcaatggaatccctgtcaatggtaataaaccaacgctcatcccaatgttttcgaaaacatggaataagatcatcatgatgaccccagttgagacatacgcgtaaaattcattcttcgtatcaaatgtgacccgaatcatttggtaaatcaacaagaagtacaaaagaatcacaaaacatgaaccgacaaagccgaagttctcaccaatgacagagaaaatcatatcggattcacgtactggcacatggacttgcacttgattgaagcctttcccaaatagctgaccagacccaatcgcttttaaactctgcgataattgtaaactggtactggcagtattatcaaaaggatgcagccaagcatcaattcgattgaattggtacgttttaaagcccagatgcgtcaagattacccggccaggggtcgtcgccgctagtgtaagggccgtgcccccaacagcgactaagacagcaatggctggggctaaaatcttccaggtcacacctgagacaagcacaatcccacctaagatggcaacgaacactaataaggtcccaaagtcattttgtaatttcaataggaccatcactggaagtgtccatagtaacattcgtccaagtaacatccaatccgtcttaatcgtgtgttctggataagccgtattgtgttgagtaacgaccctgcccaacatcaaaatatatgccggtttcatgacttcagatggttgaaatgagattggtccaagagagaaccaactctttgccccagtttgcaaggcgactgcccgattataaaagattaaaacggcaatcaagaggaaaatccctaacccataagccagtggtgcaatccgccatagttgttctgaatcaaactgcataattgcgacaatcgcaattccaccaatcacgtaccatgcagcttgcataataacggctcgagttgaactcgcacctgatgtatcatgtgatgttgccacatagattgacatcaagccaatcaacgctagcataaagactgaaaagacgattccataatcaactcgcgaggaatcttctgttgtttctacttcctttggcatgctaagtctccttcaatcaattctgctctcattatataaataacccggccagaattctgccgggttactgtaattctaattaattcttaagaattaaccttggtgtaagtggtactcccgtagtaattcgttaactgcatcgtcgtgggtcttagtaatgatactttgaccagtcccttcaacagttgcttcaaaacgtttcttagcgctatcttctacaatcacgccaatttcatttttgccgaccatgacgcttgtcatttcttggccattacgtttgatgtcatcaattgtgacagtaattttttgttctttttttgacatagttatgttgaacccctaacttctttgacttacttttgtgactcgtcttgctgtcgattacgcaaaacggtgaaatgatctggtactggatcatagccgccccgtacaaacgggtgacaacgcaatatacgaccgatgcccatgattaaacccaaaatagcaccatgtttttggattgcttgaatcatgtaactcgaacatgttgggtaatatcggcaactcggtggtaataatggtgaaattcccttctgatagaaacggaccaatccaatcaatattttccgcaatttatctgcctcactttagcgcatgctactgcaagaaattaataatatgactccatgtactaggcaagaaaacggcaaatggattctggccgccaattgcaaaaccaatcatctgaccaactaataacgcaataattatgagcacgaaaaccaataaaattttctttaaaacgggtttgacgtgttcgtcaaaatttgattgatacacacaatcacaatccttctttaatagaatgcggcttaataagcgcgtttatgttcaatattatctaataagatgccagtccctaaagcaacagcatccaatggattttctgctaagaccaccggaaccttcaaatgttctgagaataagctagcgatattgcgtaataaagcaccgccacccgttaacatgattccccgatcaataatatctgcagataattctggtggtgtcacttctaacacttctttggcagccgcaataatttccatcattgtttcatgcaaggctgattcaacttcatctgcactaattgagacagattgtggcaacccacttaccatgtcccggccacgaatctcaagtgactcactcgcatcagcatgccaaacgttaccaattgttaacttaattgtttcagccgtatgttcgccgattaatagattatgtttcttcttaacgtatgcggcaatttcactattcatcttatcgcctgcaagacgcaatgaacgacttgtgaccacttcacccattgaaagcacagcgacgtcactggtcccaccaccgatatcaataaccatgttaccgcgtggttgaaaaatatccatgccagcacctacagccgcgacttttggttctaattccaagaagactttgccgccacctgatttttcagcagcttcaacaattgctttttgttcaattgatgtaatatttgttgggcagcaaatcaaaatattaggttttgataggaagccctttacatttaatttattaataaaatacgctaacatttcttctgtaatgtcgaaatcagcgatgaccccatcctttaatggacggacagcgtggatattgccaggtgtccggccaaccatccgatacgcttctgagccaactgctaaaacttttttggtttgggtatcaatcgcaacaactgaaggttcgtttaagacaatgccttttcccttaacgttaattaagacgttggcagttcccaagtcaatcccgatatctttagccatttggtgttgctccttccgagaactatattcagtaaatcattataccataagacaggtacctttagtatcctgatttggcaaaataaaaaagcgacgtccgctgaaatagcaggcgccgccagtctgttttatgcacgttttgcttgtttaatccggtgaccggcagcatcaaaatcagctcgactaatatgtgccccaagtgcccgtaatttttgatggaaatgatagtaaccccggtccatgtattgaaggttcgtaaccaacgtttcaccattagctactaacccagcaatgacaagtgctgcggcagctcttaaatcggttgcagccacttcagccccattgaaatgtgtatcgccataaagcacaactgattgaccttcaatttgataatccgcattcattcggcggagttcttccaaatgcatgaaacgattttcaaataccgtttcggtcataacactcgtcttcttagcaagtaattgaagtgtcgtcatttgtgcttgcatatcagttggaaagcctggataaggtagcgtcttgatattacatgcctttaattcagcgggaccaataattcgaacaccagcttcttcgtcaatcacttccgcacccatttccactaattttgataggagtggtttattgtgttcagcaatcgcttctttaatcaagacatttccttgtgttgccgcagcggctaccatgaaggttccggcttcaatccgatcttgcacgatactgtgatccgtcccgtgtaaagcggttacgccttccacccgaattgtctcagttccggcgccaaaaacgttcgcacccatcttgtttaagacattagcaagatccacaatttcaggttcacgagcaacgttttcaatcaccgttgtcccttcagccattgtcgcagccatcacgatgttttgtgtcgcaccaacactaggaaaatctaagtaaatattagttcccactaggcgttctgctttagcttcaatgtaaccatgattttgatgaatggttgcaccaagtgcttcaaaacccttcaaatgtaaatcaacaggccgcgaaccgatagcacaaccacctggcatcgcaactcgtgcgtgacctaagcgcgctaataacggccccatcacaacgatggaagcacgcatttttgaaacatattcaaaagctgcttcaaaattcaaatcaccactggcatcgattgttaattggttccgttgttcatcaaactcaactttagcatctaaactctttaatacatcttgcatcatgaagacatcagataaaataggaacgttcgttaattgaacgggtccgtcggttgctagtaaggcagccgccataattggtaatactgcgtttttggcgccttcgatttgaacttcgccaactaatcgttgaccgccttgtataatcaatttttccaagagtttccctccgaataagactgctagtttatgggactaaaaaaatcacatttttagcctgcgcgattatttctaaaaagaattggctaacggtgtagcccatcacaatagcgagaaatactatgacaatctgtacttgacggatatgattcggtttgaaaaattgctcaaaccggattgattgtaagccataaaaactgattaaaataaaaccaatatggctaataattgaaataactgcctgtaacccgattgattgcacttaaataacgccccttttgtgatatgcaaacattgtaacataccgaaataggatttgtctgcccaccagactgaatcttaagaaacaaaaaaagccttaaaccattcaggtttaaggctttttgaatcctacaataagtgattcttaacgttaatccggtttatcgcacgttgcagtgcaatttgagcccggcgtaattcgtcagtatcattatgttcggacgctgttttaattgcgttttgagcacgttccttggcactttgcgcacgcctaatatcaatatcacgcgcccgttcagcactatcggcaacgattgaagcaacgttatggctcacttccatgaacccaccattgaccgcaattgcgtcttcacgtgctggatcatcagtccgtttaacgcgaatctcaccaatttctaaaggggtaataattggctcatgattagccataataccaagttgcccggccatcgctggtacaaccaacaatgttgcgtggtgatcatagacaatcccacttggggtcacgatattaacggttaataccttttgttcttctgccatcattaacgcccctttctaagcttgtttcgtttcttgttcggatggtgtataacccaattctttagcttttgctaatgcagcatcaatattcccgacaagccggaatgcttcttcagggacatcatcatagtcacccgctaagatgcctttgaagcctgccactgtatcttttactggcacgtatgagccggcttggcctgtgaaggcttcggcaacgtggaagttttgtgataagaagaattgaatccgacgagcacgcgcaacgataatcttttcatcatcagataattcatccatccctaagatcgagatgatatcttgtaattcacgataccgttgtaagacgtgttgcacttctgaagcaacttcgtaatgttcttcgccaacaatttctggatccaaagcactagaagttgattctagtgggttaacagcaggataaatcccctgttgtgttaatttacgatccaagttagttgtagcatccaaatgcgcgaaagttgttgcaggcgcaggatcagtataatcatcagcaggcacataaatggcttggattgatgtaactgaaccttttttagtagacgtgattcgttcttgcaattggcccatttctgttgccaatgttggttggtaaccaacggcagaaggcatccgtcctaataaggcagaaacttctgaaccagcttgagtgaatcggaaaatgttatcgatgaacaataacacatcttggccttcaacatcacgaaagtattcagcaattgttaaaccagtcaaggcaactcgcatacgagcgccaggtgattcattcatttgaccgaaaaccatcgctgtcttttccaaaacgcctgattctttcatttcaaagtataagtcattaccttcacgtgttcgttcaccaacaccagtaaagacagaaataccaccatgttcttcagcgatattatggattaattcttggattaaaacggttttaccaacaccggcaccaccaaacaaaccaattttcccacctcgtaaataaggggcaagtaaatcgataaccttaatccctgtttcaagaatttctgaacttgtatttaattcctcaaatttaggtgcagaacggtggatactgtcccgtctaaaatctgcaggaaattcttcgccgccatcgattgtttcaccaagaacgttaaatacccgtcctaaagtttctttaccaactggtacgttaattgcacgaccagtgtcttcaacagccatcccccgacgtaaaccgtcagttgattccattgaaatagtacgcattaccccatcacctaattcaagtgccacttctaagacgacagattcgtcgttccctttgttgacaaccaaggcattattgatatctggtaaagtcgtatctaaagaaaattcgacatcgacaacgggaccaataacttggacaacttttcccatactcatagttgttattttcctcccgcgtttcttattctaatgctgccgcaccaccgacaatttcggtgatttctgtagtaatctgtgcttgacgtgcccggttaaatttaattgataaatcagaaattaaattattagcattatcagtggcactcttcatcgccgtcatggaagcagaatgttcagctgttttagaatcaagtagtgcgccgtaaatcaaactttcagcgtattgcggtagaatggcatctaaggcatcatcaacagaaggttctgtgatgtattcttgatctttatcagtgacttctgaaacatccaagtcggtaataggtagcattttttcagctcgaaaagcagatgtcagtgagttgacatggtggttgtaacaaacgtacaactcgtcaaacacgccgctatcatacattgcaacagctgttttgatgatttcacggacttcattaaatgatggcacatcacttacaccacgatattcgtaggataagttcatttgccgtgctttaaagaaatcagcaccagtgccaccaacggctaaaatagcatattcatcggcagacttgtggttttctgaaatcatttcaaccattgcttttaagattgagctgttataagcgccaaccaatccacgatcactcgtgatgaccaaataaccggtctttttgattggtctttccactaacaaattacttaacgtaatgtcatgccgcaatgatttctgtgaagtaccgttagtagcttctgctgctttagcggtacttttttgacgtgcacttgcaattaattgacttgcagccaaatgcgtgacgatttctcgaatcttattcgtatattgttgataagcgattgaatttttttcaatctgagaaagttttgcaccagagaccatttgcatagcactcgtaatttgcccagtttttttagtagaggcgattcttcgtttgatatccattaaagattcagccaattaattcaccccttactgtcctgagtcttgattgtcagcagtagcttcagcgccgacaaaaccttctgtgaaggatttgatagcagcatctaacttatctgtatctggcaatgcagcggtttgacggatagtgtccatcaagtcctttgcgttactttcaagataatcgctcaattgactttcatattgcatgatatcgtcaactggaacgtcatcaataaagccgtgtgttaatgcataaagaatcgttgtttgttgttcgaatggtaatggtttgtgaagtggttgtttcaaaacttcaacagtccgtttaccacgatttaatttcgcttgtgttgccgcatccaagtctgaaccgaattgcgtaaaggcttcaagttcacggtatgatgaaagatcaagacgtaatgtcccagaaaccttcttcatcgccttcgtttgcgctgcgcccccaacacgagaaacagatgacccagcatcaatcgctggacgtgttcctgaatagaataaatcactttccaagaagatctgaccatcagtgatggaaataacgttagttgggatataagctgagatgtccccagcttgtgtttcgatgattggtaaagcagtcattgaaccgccacctaattcatcacttaacttagcagcccgttccaataaacgtgaatgtaagtagaagatatcaccagggtaagcttcacggcctggaggtcttctcaaaagtaatgaaatttcacgataagcagcagcttgtttacttaaatcatcatagacgattaagacgtgcttgccgttatacatgaattcctcacccatcgctgcaccagcatatggtgcaatgtagagtaatggtgctggttgactaggaccagcttcgacaacgatggtataatccatagcgccgtaacgacgtaaggtttccacttgcgctctaacggtcgattctttttgaccgatcgcaacgtaaatacaaatcatgtcttgatctttttgattaataatcgtatcaatcgccacagatgttttaccagtcttacgatccccgataattaattcacgttgaccacgaccaattgggaccaaagcatcaatggctttcaaacctgtttgtaaaggttctgaaacagattgacgtgccataacgccaggggccttcttttcgattggacgagttttgtccgttttaatttcgcctttgccgtccacgggttgacccaatggattaacaacacgaccaattaaagcatcgccaacaggcacttccataatccggcctgttcgtttaacttggtcaccttcacgaatgttttcatattcacctaagatgataatcccaacatcgttggtttccaagttttgcgcaaccccgtatgaaccgttagaaaattctagcaattcacttgaaagggcgttttctaaaccgtgagcacgtgcaatcccatcaccaacataagtgacagtaccgacttcttcaacggctaaatcttcattataatttgcaagttgttgtttaattaatgcactgatttcctcagttttgatgctcatcaggttcacctctttatcaacgattgactatttcaatagtaatgacttaatttgatctaagccatgtttaacactgccatcgatcaccttgtgattcgattccagtacaatcccaccaataatatctggatcaacgatactttccactaagacctgattgagaccttcgcgtttagcgtagctttggctaatctttacgatttgatcaccatctaaagcaacggctgacgttaccttagcgtgtgcaatccccatcttttgatcataaagatcttcgtaggccgcaataatgtatggcatctcagccattctttgatagtcaaaaacaaggcttaaaaagtgttgcatgagtgtactaaattcaccggaaaggctctttagaagctcacgttgtttcaatccagataaagtcgtatcagtcagaactgcacccaatcttgggttgtcattgaaaatagtctcgagtgcttgtatctcttcatggatactttcaaattgttgctcttgttctgcaagggaaaataatgcctttgcatagcgttgtccgactgcatatttatctagtttcattttgcttgtccaacccttcaatataggaattgatcaatgacttttgatcagtaactgacaattctttcttaatgagtttagaagcaatttcaatagatagttgagcaacatcatctctcacactgtttaacgcatctaaacgagattgttcgatgtcttttttagcattttgttttaaagtttggacttcttcttgagcaagtgtgaccatgccttcgcgttgtttttcaccatttcgcttggctgtattcacaatttcaactgcttctgacttagaattcttcaactctgttgcgcgttgtgctgctaatttggcagcatcttcacgtgattgagcggcgttatctaagtcgtttgtaattttgtcagaacgagcttgcatcatttttgaaacaggtccgaacgcaaatttaccaactaaagcgactaaaatgataaagacaactaatacgaaaagtgaatctccaaggtaggcttcagaagcaccaacgattaaattactaaacatctattgacactccttccttgacttactgactaatttttaaagcgaaaatttagattcactcggattaactaaataagatcaagaaagaaacgacgatagaaagaattggaacagcttcaatcaacccaacaccgataaacattgttgagcgtaattctgctgataattctggttggcgtgccatactttcgattgtttttgagataaccttaccgttaccatatgatgctgcgaatgctgctaaaccagctgcgatagctgctgctaaatagttcatgttttttcctcctaatttttagtcttccatttcaactttttctgaaatatagactatcgataatgttacaaatacatatgcttggattgccccgataaagacggagaatccttgccaaaccatttggatcggtgccgtcacaagcatcgttgctggtccatgtgagaaggccattttaactaataaacttagtaaaacttcacctgcaaaaatgttcccgtacaaacgcaaggacaacgttaagaaattggtaaattgttcgatgatattaattggtaagaaaaatcctaccggtttaatataactcttcatgtaattaccaaaccctaaccgttcaacactaaagtagtgcgcaatcactaagacgatcattgcaagcgacatagtgataatcggattggccgttggactcttcaaccaagttacatcatgtaccttaatttgaagaatcaaaccaagttgattactgataaatacgaacatgaacatgacgaatgcaaataagtaaaattgtttaccttcttcaccgggcatcgcacttttaacgattccgttcgtaaaatcaatgatccactccaaaatattctgccgtttagtcggtttaagcgcaatttttcttgataaaaagaaaacgagtgcaaaaaccaaaactgcacttactaagaccgatagacagtttgctaaattaaaacgaattcccaaaatgctaataatgggatatttatcatccacaaaattccctcctcccttaggcttatttgttgattccactctatcaacgactacgcgagttgcacaacgaacctaaaaacagcaatatttatgtagaaaaattaagcataaatcatcaccgcaatacaagtatgataataccaccattaaattaaaagtacaaagcaaatactaactaatttctaattatttttttgtcaatgcactcaaataccataaatattatcatatcaaaagattaaacttattaacggttgcttttttggcaaaaaaaacgcgtaacacaggaaaatcaagtgttgcgcgcttttattatcggtacctaattaatggctatttagtcccgaaaagacggtcgcccgcatcccctaaaccaggaacaatgtatccatcctcgtttaaatgatcatcaagaccagctgcatagatgtcaacatctggatgggcttcttgaacagctttaacgccttcaggtgcagccactagtacaacaaggcgcattgacgttgcgccgcgttttttaagggcatcgatggccatgattgctgagccaccagttgcaagcattggatcaacgatgaatagttgtcgttgatcgatatctgttggtaatttaacaaagtattcgtggggttgtaatgttttttcgtcacggtacataccaatgtgaccaactttagcggctgggattaattctaaaacgccatcaaccatcccaagacctgcacgcagaattggcacaacggctaattttttcccgctcaattgtttttcaattgcaggccccattggtgtttcaactgctacgtcttccattgctaaatcgcgcgtgatttcataaaccattaattctgcgatttcgtttgcgacttcgcggaaaactttagtacccgtatccttattccggataatcgttaatttgtgttgaattaacggatgatttaatactgtgaattttgccatttactttgcccctattctattcaatgaatttagtccaaatttttttcgcaaaaaaagagtgactccaaagaaaaccttctccgagtcactctcccttccgcgtaaaattctgtttactattgtagcgtaaatagcatcaaaaaactagcggtattcattaattaatctaaaaatttagcttgtgtgattggaaaacgatccgtcaacgctaaaacatctgcactaatgcgcgtcatggcgtctaattgatcgtgtttttcaatcacttctaaaattaattgcgcaatcaattcacaatccgcttctttaaacccgcgcgatgtgattgctggggtcccaattcgaatcccacttgccttaaatggacttaatttttcaaaaggaatggtattcttattaacggtaatgtggacactatctaaaaatgcttggacttccttcccatttaagccactctgcgttaaatcgagtaacattaaatgattgtcagtcccgcctgaaaccacacgtactaagtcagattgttcaaaaacggcagccatcgcttgcgcattggccacaatttgttttgtatatgctgtaaattcaggttgtaaatcttcaccaaatgcaacagctttcgccgcaatgacatgttcgagcggtccaccttgaataccagggaagatggcagagtcaattgctttggcatattctgctttacacaaaatcattccaccacgaggtccacgcaacgttttatgcgttgttgtggtcaccacatcggcatatggtactggacttggatgaacaccagttgccactaaaccagcaatgtgtgccatatcgaccattaaataggcaccgacatgatcggcaatggcgcgtaaccttgggaagtcaattgtccgactgtatgctgatgcccctgcaacaatcattttaggatgaatttcatccgctttagcagcgagcgcatcataatcgattcgttcgttatcgtcagcaacgccataactatagaagtgataaagttgcccactgaagttaaacggtgacccatgggtcaaatgaccgccatctgtgaggttcatccctaaaatcttatcaccgggttctaaaagcgcttggtaaactgccatattagcctgcgaaccggagtgcggttgtacattggcatgttctgcattaaaaagttgtttagcacgttcaatcgcgagtgattcaatttgatcgataaattcacaaccaccgtaaaaccgtttgcccggataaccctcggcatatttattggttaatacgctaccttgtgcttcttgaacagctccggaaacaatgttttcagaagcaattagttcaatattatgcacctggcgttgttcctcttttttaatcaattcgtaaattgctggatcagtttgttcaatcatttacaatcactcctcttcctattaaaatagtgcctatttcgaagtaaagtattgttggccggcagacttctcgaggcgattcatatacgctaatccgacaccctcttttgcgaagccttgcactaatataattttaacctcaggattcaaatcaaaataccgtaatccttcaaacaagtgttgactagcagtcactacagaatcacctaaagagaactgatctttaaacctaacgtcagataactgccctaacaccgtatcaaccgccataacaccaaatggcacattttgttgactggcccatttaaccgccgccggaaattcatctggcgttggcactatgtaaacctgtgcatttggagcatagtgtttgtatttcatgcctggtgcctttggcgtttcagctgcgccaactttatggtggtttgtcataatcggcccaatcacacgttcaatggcttcttgagtcacaacaccgggtcgtaaaataacgggtgtcgcaacacttaaatcaatcaccgttgattccaacccaacaccagttggaccatcatcaatgacaccggcaatctttccatttagatcatgtaaaacgtgatcggcagtggttggactgggcttgcctgatgtattggctgaaggccccacaagtgggacaccggccgctttaatcaagtctaacgtcaccgcattgttcggcattctaaaggcagcggtctttaaaccacccgtcacaactgaatctagtgccgcatgttttagcggcaaaataattgtcaatgaaccgggccaaaaagcgtcgactaattgcttaaatcgatcactaactccggctgcgtaatgctcaaccgtcgcaacacttgctacatgcacgattagcggattatcacttgggcgccccttagcggcataaactttcttaaccgcttcaggattcgtcgcatctgccccaagaccatagacggtctcagttggaaatgaaatcaattcgcccgcttttaaatctgctgctgcttgttcaatctgttctactgtgtatctcttggtttccattataggccttccttactctacttctgatttacatcataccaaattccgattgaaatcgtaacccacacgggccattctagaccaattagccatatcttttttgattgtaaccgctacatcggtcgattcatgttcgaacaaccgaacgatcgcctctttttgctgataaccgaactctaaataaagctgcccatctggttttaaatacgcacgcacttctttagcaaaccgttcataaaacgctaagccgttattatctgcaaatagggccaagtcgggttcgtatttcaaaacggacgcatccatcacatgccgttcatcttgtgcaatatatggcggattagacacaatcacatcaaactgttggcccatcactggggttagaaaatcacccacgataaagttaacatgcgcgtttaattggcgcgcatttgcttgtgcaacagcaatcgcttctagtgaaatatcaattgcggtcacttcccattctggatgctcacaggcaagggtaattgcaatggcgcccgttcctgtcccaacatccaacactttaagtggtcggttctttggttgtgtagcatctaatatccattctaccaattcttccgtctcaagtcgtggaataagcgttgccggcgtcaccttaaaatcgcgtccgtaaaaattagcatatcccaaaatgtattgtgccggttgatcagcgataaacgcgtttaagtctgcttgatactgatcgtattcggcagtcggcatttcatcgtgataatgcaagaccagttgggtcgtcgtccaatgtttacgaccgagtagtaaaaagcgcgctgcttcacgttctttagcgtgttcttctaaaaataaaaaagcccaattcagggctttaagataagtgagctgtgccatcttgtaattgctccaatttttcggtttgatcgtaaagaattaacgcatcaatgacgtcgcctaattccccgttcataatccgatctaatttgtttaacgttaaaccaattcgatgatccgtcactcggttttgtggatagttatatgttctaatccgttcagaacgatccccagacccaaccgctgacttccggcttgaatcgtattcactttgattttgtgattcatagaaatcataaacccgtgactgtaagatttgcattgccttcactcggttttgttgttgtgaccgttgatcttgcatcgcaaccacaatcccggttggaatatgcgtcatccgcacggctgaagaggttttattgatatgttgaccaccagcacctgaggcacgataaacgtcagtccgaatatccttaggatcgagctgcacgtcaaccccatcatattcaggcataactgcaacagtcgctgttgaggtatgaacacgaccttgtgattcggtctttgggatccgttggacacggtgcgcaccattttcatattttaacttcgaataaacatttttaccggtaatcatcatcgcaacttctttgaagccacccacttctgtagccgtttcatcgatgatttcagtttgccagttttgtgattcagcgtagcgttgatacatattcaacaaatcacctgcaaagagactggcttcgtcgccaccagcagccccacgaatttccatgatgatattcttttcatcgttaggatccgttggtaacatcaaaatcttgatgtcttgttctaattgttccttttcatcttgtaactcacttaaatccgctttagctaattcttccatttctgggtcattagattcgcgtaacaattcttcgctttctgcaatgtcgtttaagacagtcttcaaacgcgtgtatttaccaacaatttcccgtaaacccgcttcttctttagacaattccatataccgactggtttcgttgatcacttctggatcagacattaattcctgtaattccgcatagcggtctaacaaactatcaagttgttcaaacattttatccatgaatgactagccttccttttcactctcttgtgttaccggtgggttaaaatagtgtttccgacaaacggggtagtatgcttcgttgcccccgatttgaatctgttcacccgtataaaccggtttgccatcgttcattcgcaagttcataatcgcttttttgcgacagaaccaacagatggtcttcatttcttcaatcttattggcaaatagcaataagtatttcgagccttcgaataattcattcttaaaatcattcttcaacccaaacgccatcaccgggatattcaaatcatcaacgacctgcgccgcttcgattacgtgatgccgttctaaaaattgtgattcatcaatcaagacacacgctgcatccggattagtcgattgtaccaactcaaagatattcgtatccgagaaaatcggtgtcgcctcacgtttgagcccaatccgacttgaaacaatccccaccccgtcgcgattatcaatcccactcgtcaggatgatcactgatttattctgctcttcataattgtgtgcgacttttaaaatttcaatcgacttaccactattcattgcaccatatctaaaaaataattgcgccactctcaaacacccctatgttaagcacattttaatctagtatacctgaaaatcagcgaggcaacaatattcgccactattaaattctaaagtttcccttattttatttgcagatgcgtttttatatcgtccaaattgagaatttatgctatgattatgaacattgaaagggtggcaagcatgacaattaaaagctcatttgcaattacagcaggacgtttttcatattggtatttacatacctttatgaaaggtggcagctccctccccgggaaaatcgcaaccaagttcgatcctgctgtgttaaagcagttaaccaagaactacgacgtgattatcattaccggtaccaatggtaaaacattaacgaccgcactcactgtgcagacgttgaagcaaaaatacgatcatatcatgaccaattcgagtggctcgaacatgatgcaagggttgaccaccgcctttttagcagatcatcctcaaaaaggacaacggcaattggccgtcctcgaagtcgatgaagccaatgtggaacccctttgtcactacatcaagcccaaagcgattgtgatgacgaatattttccgtgatcagatggatcgtttcggcgaaatctacacgacttataatatgattctagcgggcgtcgaactcgttcctgaggcaaccctcattatgaacgctgacttgcctctcttttcatcggttgaacttcctaatccaaagatttattacggattcaaccacttaccagatggcgaaatgatggctccaagcaacacagacggcgttttgtgccccgtttgtgatcacatcattcattacaaattcatcagttatgccagccaagggaagttttactgccctaattgtggctaccaacgacctgaattagacgaagcagtcactgccatcaatcagatgcaccccacaaattcacactttgaaattaacaacgaaccgtttgaaatttcaattggcggcatgtacaacatctataacgcacttgcagcctatagtgtcggtcgattctttgatattccagtgaaagcaattcaaaaggccttcactgaagacaaacgaatctttggccgtcaagaagtcattcaattaaaagacaaagcggtcacattggtactcgttaaaaatccggttggcttaaaccaagtcttacaaatgatcagttctgatccagaagacttttcactcgcaatgttgcttaatgctaactatgccgatggaattgatacgagttggatttgggatggcgagtttgaagacttactcaaacacaacattccaaccgtgattaccggtggcgaacgcggtgacgatatcgctttccggctaaaagtagccggtgtcacggcagatcaattacacgaaaccaaagaactcgatgcaacgatggcagccattgaagcagccccaaccaaacatgtttatgtattagcaacttataccgctgttttacaactacgtaagaagctggcagctgccaattatattaagaaaggactatcagtatgacccagacattaagaatttgtcatctatacggcaatttaatgaacacatatggtgatcttggtaatattttagtccttgattactatgccaaaaaagttggcattcaaactgaaacagaagtcattagtatcggtcaagatttcgatgcaagtcgttacgatatcgttctcttcggcggtggccaagacttcgaacaaaaaatcatctcagaagacctcaacgacaaaaaagcagccctcaccgaatacattgaaaacggtggtgttatgcttgccatctgtggtggttatcaattattaggtcactactatattggcgcaaacggcgacaagattcctggaatcggcgcacttgatcattacacattgagccaagataacaatcgttttatcggtgatattgtcatcgaaaaccgtgagtttaacgaaacctacctcggttttgaaaatcacaacggccggactttcttgggcaaggatgaaaaaccacttggttacatcaaacgtggtcacggcaacaatggtgatgacggcaccgaaggttgtgtttataaaaacacatttggttcatacttccatggtccaattctcacgcacaacggtgttttagccaaacgacttttatcgattgcggttagccggcgttttccagaatttgatttacaacaaatcgctgacttaccactcgaagaatcacgttaccaagtcgatgcagccggcgtcaaacgcgtccaaaattaacaaatcaaaaagtcgaccattatgcggtcgacttttttgatgtcttaatcatttcgcaagaaaaaatacactttttattcataaaatgataatcgtttcacaatacttgctcggtatactgactttaacctataaaaaggagcgaatcattatgttaaatcaaatgccagcagtcgagtccgttcaaattaatcggattgaaaatcatgataaagttttcgcaaccactgaaagtggtcaagaaatcgaattacatattaccgaccaacaaaaaaaggaccgcctcttctggaaatccctcatcaatatcctccgcgctgaattgtggttacccctgcaaaagagaacccacgaactactccaaaacgactggctaacggtcgatggctagcgtgtggctctgggttcggatgacttacagaacacgtttaaacgatcagaacacaactatccaaaagggcgctaacaaaaatattgttaccgcccttttgcatatcaatgtttcgttttttagcgttgccctgtccactccgctaaatactgatccacaaactggtgcatgaaatccgttcgcgcttgcgcgatttcgcgcgctgcctgtgtgttcatcgttgctgccaatttaaataatttctcataaaaatggttaatcacggtagacggttcgcgatagttttcctttgtcaattccgcccgtggttgaatctcaggatcataagcaaccccatcgtgtgcgccaccatacatgaaggtccgcccaatcccaatcgcgccgattgcctctaaccgatccgcatcttgaacgatttgcccttctaaacttagcgtttggtgttgattgagatttttcgaaaaggacatgtggtcgataatatcaaaaattgccgtttgttggccatcttgtatgccgttttcggttagtttagtttttaccttttgtcgagcctgttcaacatcagtcgcgattttttcatcaatcacatcatgcaataaggccgccaagataatcgttgttaggtccgcagctaactctttttgctgaattaaacgggcattattcacgacccgttgaatgtgatcgaatccatgaccgctgtgttctgctgccaattccgttcgtacaaattgttcaattgcttcgatttgtctttgcatacttgtcatcctactcttttaatcattaaaaaaaattgcaaccacggctgcggttgcaattggttatattcagtttacttgttacccggttctgacgcaataatttgcatgtcaccttttaagtcccatgacttaatatcaaatggtaacacaaaatgcatattcttgtgaattgggtaagtttgcccatcggtaatcagttcgccttcaccatcgaccacggagactaaagtatagggtgccgttgtccgatcaaagtgtaagtcgcccttcactaaccattggtaaacactgaaaaatggtgacattggtggttgcacataagtcgtgattgttgaatctccaacatgttctgtttgaatattcaaaacgggatcttgatgcggcacaatcgtcgtatcaattgattgcttcaagtgtagttcgcgtttttcgcccgtcttagcatcaacccgatcataatcgtataaccgatatgttgtatcactactttgttgggtttcaagcgccataatccctttgttcaatgcgtgaatcgtgccacttgggacgtagaaaaagtcaccagtcttaacgggcactttgcggagtaaatcatcccacttgcctgcttcaatcattgctgttaattccgctttggtcttggcatggtggccatagattaaataagcacctggttcagcatccaaaatataccaacattccgtcttaccgagttcggttggaccttcatgagcagcagcataagcgtcatctgggtgcacttggacagaaagacttgcttcagcatccaaaatcttagttaacaatgggaatactttaccttctgcattaccgaaatattcgcggtgggttgcccatgcttgatctaatgtgagcccttttaatgggccattttcgatggtactaggaccatggggatgggctgaaatggcccaacattcaccaatatcgccgtctggtaaatcataatcgaaggcttcagctaatttgcgaccaccccaaattttttcttgaaaaacaggttttagaaataaaggttccgtcaattcactcactcctaatgcgctttatttatcaatagtcccattttaccacaaatgtaagcggataatacgcaaatttgcgaatttgactaggcttttgtttctaggtgattatccgctaaaaattgtgccacaatcgcatctcgtcgttccaaaaagaccggattatcagccgttggatgaatgcgattactcaggacaatcagccccgtttgccgcttgcgatccaatagcatgaacgtgccggtaaaaccggtgtgataaatcagtggctggtgttcttgcggctcaaagcgcaaatcccagcccagtgagcgcccgagatgttttggtgtccaatcacgatagagactcttaacactcgcctgactgattggtggctgttcaaccttcaactgccctaattggaactgggcaaagcggacaacgtcttttaatggggcaaacaagccggctgcaccactatgattttgtaaaatcgcacttttcggatcgtggaccgtgccttggattaagccgcgttcggcactcaattcagtcgggaccgccaaacttttgtccggattaaacgtactggcttgcataccgagtggggttaaaacgagttcttgaatcaaatcctgaatcggtttttgatagatggcttcaatcatccagcccaaatacaacataccaatgtccgtgtaaacaaccttttcaccaaaatttgggccgaccgttaattgcgtcaaaagcgccgtttttaattcggcagccgataattgattccgattcggaatgtagcctgttaaaccggacgtgtgcgtcaatagatgcaagaccgtcacccgtcgatctttaaaggccggcaacaaactatgcacttttgttcgtaaagaaagccgccctttttccaatagccgtaaaataatggtcgtcgtcccaatcactttcgttaatgacgctaaatcatacaactgatcagcttttaacggcactttttggggcactaattcggcctgcccgattacattagtcatcacttcagggccttcgatgatggcataagaaacaccagggacaatcccttcatcaactagcgcttcaatttgccggatggtttgttcaaatcgcatgttaaattcctcctactacatcaatatcactagtatacgccaaacacggacaaaaataaggccgcagattttatctgcggccttatttgcgtcattcacgcttaaattttaacgttgcctgagaattgactattgtacaagtcagcgtagaaaccatcttgtgccatcaaactatcatgagtcccggtttcaataatcgaaccgtgattcatcacgatgatgttatcggcatcgcgaatcgtcgataaacgatgggcaaccacgaaactggtccgattttgcaacaagcgttccatggcgtgttgaatatgaatttcagtccgtgtatccactgaactggttgcttcatccaaaatcaaaatctctggatcggcaacaaaggcccgcgcaatcgtcaataattggcgttgaccttgggagatattcgaagcttcttcattcaagaccgtctcatagccatcaggtaattgacggacaaaaccgtcaacgtgcgctgctttggcggctgctaaaatggcttcatctgaagcatcagcgttcccatatttcaaattatcccaaatcgttccagtaaataaccaagtatcttgtaaaaccatcgcgaagtgacgccgtaattgttcccgagtcatatcgcgcgtatcgacacctttaagcttgattgaaccgccactcacgtcgtagaagcgttccaacaagttaatgatggttgttttaccagcacctgttgggccgacaatcgcaatcatttgacctggtttgacttgcaagttgtaatccttcatcaagatatctttaccttgataaccgaattcgacatgttctaattcaagtagattttggtcatcaacaatcgctggcacttctgatgggtcgtcactcatgtcatcttcatctaagacttcaaagacccgttcagctgaggcaatcgttgattggattgtattcgctaagttggccaattgcgtgattggttgtgagaattgttgcgtatattgcatgaacgcttgcatatcccctaaagtaacttggccgtgagaaacacgaatccccccaacaattgctacgaagacgtaaccaatgttattgacgaacgtcattaacggcatgatgactccagaaataaattgtgccttccaagctgctttatagagtaatgcattttgttcttcaaaggcatcaattgtgacttgttcgcggttgaaggtctttaagaccacttgaccagagaaattttcttcaatttggttgttcaacaaccccaaacttttttgttgcgctgcgaagaatttctgtgatttcggtgcgacaatcccgacgacgactaaactgagtggaatcgtgactaaggcaattaaagtcaattgccaactaatcgagagcatcatccacataacgccaataaatgtcacagcactggttaccatttgcgttaaactttgttgcaaggtacttgcaatgttgtccatatcattaatcgcacgactcatgatatcgccgtttgagtgtgtgtcgtagtaattaatcggtacccgttgcatcttgtcttttaattctttccgtaattcatagacggtttgttgggaaatccgcgtcatgatgaattgttgtaagaaactgaaaaccgctgatgctaagtacatcaaaatcaccgtcataataatgtgttgaatcttatcgaaatcaattggtaagccattcatcggcatgcccgctttttgcatggcattgcccttcataacacccttgaagatttcggtcgttgcttgtcctaatacttttggtgttctaatttggaaaataacggagatgattgctaaggctaacacaatcactaatccgattaaccggctagacatgtaggttaataatcgtttggttgtgccccaaaaattcttcggtttttcaacgacaccacccatgccacggcctgggccatgtccaccttggggtcgattggttgttgttttttcagccattagtcttcatccccctctctgatttgtgagttaataatttcttgatatgtggcgttattagccttcaattcagcatgtgagcctttaccgaccagctggccttcatccaagaccaagatggtgtcggcatcggcaacggttgatacccgttgaccaacaatcacaacgacactcttttgaatttcagcatcttcttttaaggctttccgtaataaggcatccgtcttaaagtccaacgctgagaaagaatcatcaaagacataaacagccgcttttttaaccaacgcccgtgcgatggcaagccgttgacgttgaccaccagagaagttgcccccaccttgttcaacgtgactatctaagccaccttcaagttcgctgacgaaatctttagattgtgcaatttcaagtgcgtgccagatttcatcatcggtcgcattcggattcccatattgcatattttcccgaatcgtcccggtaaataagttcgctttttgagggacaaatgcaacttgttggtgaatgtcatggagggtcacatctttcacgtttaaccctttgactgtcacttcacccgtttcaacatcgtaaaaacgaggaatcaagttgactaacgtggtcttccctgagccagtgcctccaatcacggcgactgtttggcccgctgtcatttggaaatcaacgttttcaagcgctaagtgttccgcattttgataacggaagttgacctggttgaaagccaagcttgctggttgatcaccaaacgttttaggcgtcgctggatcttcaatcggcgtgtgtaaatcaagcacttcattaatccgcactgctgaagcttgcgcccgcgggataaagacgaagaccattgaaagcatcatgaaactcatgaggatttgcatcgcataagtcacgaacgctaataaattcccgacttgcattgcttgattggcgattaagtgtccacccatccaagtaatcgcaatgttagtcccactcatgattaacgtcatggctgggaacatcactgacataatactataaactttcttcgcattttgcgtgtagtcagtattagcttcatcaaaacgttcttgttcgaacttgtcgcgccggaatgctcgaatgacccgaaccccggttaaaccttcccggaaaactaagttaatccggtctgtctttttctgcattgccttgaataatggcacagcgaagtacatcaccccaccaatgaagagtgccatgattggtaagacaaccaagaaaatggatgtaagttgcgcatctttttgatacgctaagaaacttgcgccaatcaacatgataggtgccataatcatcatccgtaagaacatcattgccacattttgaatctgcaccacatcgttagtcgtccgcgtaattagtgaagacgtcccaacttgatccatttcatcgtgtgagaagttgatgaccttccggtagatatctgaacgtaatttttggcctaagccttgtgacgtccgtgccgcaagataaacgttgcagacggccgcgataatactaattaatgaaaaacctaacattttaaagcctgcttgccagatataatcaatattccccttagcaatcccgtcattgacaatgtcggaggttaaattgggtaaataaaggttactgacaacctgaatcgtcatgaataaaaccgcaccaaagacggcccaacctgacattcttttctttgcaagtttaagcatgttgtgtgtcccttctttccttatccttgtttgctggcccctgtttctaaccagcctaatactaattcgaagcgttcttggacctgttcaattgtaatcgcatggtcactttcttgttgcagataatacgctgcaatactttgaaagaccgtcgtcatcaactcatgaaataaaattctaagcgcttcgggttgatctgcgttaatcttgagcaagtcgtaattgacgttttcttctaaaaagcgcatcccatctacttgtttggcatgcattaattctggtgacatcttgcgctggttcttataatccatatgtaagaagaggtgcttgtaaaattgtgcattttcaccattaataatctcttctaccatttcagcaaagaattggcgaattgccttgaatagatcaccatgaacagccaacagactcttttctaaatcctgctttgaactgtcgcgtaataagctaaggtcgtagaaaaaaatatccgccttatcttcaaagtactgataaaaactgcctcgcggaatctccgccgttttaataatgttgctgacagatgcttcattaaacggtacccgtgaaaactcagcatgcgcagcttgaatcagtcgttgttgcttttcctcaggtaatctaaaaaatgttttcttcggcatttcgatactcctttctgaaaattaatgacagagcgtcataattgtgacgtaatgtcataatacgccaacttaggcactcatgcaagcattaaatccacaaaaaaagaaccggcaggctatcgtctgccggttccctttaaaaggcgctatttatcgtctttgtccattttttctttaatatcatccatcacgtcattggctttttcagcaactttgtctttggcatccgctaatttttctttagcttcacccataaagccctttgctttacctttggcctcagtttcgcgatcaccagtcaccttaccggctgtttcttgtactttaccggttacttggtctttcatgccatctaacttttctttatctgtcattcaaaatcactccttcttattggtctacctatatgataggatagctaaccaacattagtcaaaatttatgattatgagtcgcattatgtcagtttaccatcgcgcatcacgtattgatgatctgtataatccaagacgcgttcatcatgggaaaccatcacaatcgtctgtcctgtctctttcgtgattttagccagctgctcagcaacctgtaaggcccgtttactatctaaactagcggttggttcatccgcaaaaatcaaatctggctgaccatacaatgcccgagcaatcgcaactcgttgacgctgaccaccagataagctcgttgggtactgacgtcgttgatcccaaacacctaaattggttaatagttgttcagctgattgtggcgcttgcttttcacgtaatcgatcgactagttcgaattgttcttcaaccgttaaaaatggaaccagattcgaactttgtaatataaagccgaaatcgttaaaccgtaatgcagaccgctgtttttcgcttaattgactaatctcttgatctttaaaaaagagcttcccactcgttgggccttgtaaactacccataatcgttaataaggtcgtcttcccagaaccagatggtccggttaaaccaatgaactggcccttttcaatcgttaaatcgatttgatctaaagccgtggtttgctggtcgcctgcgccaaattttttgacgattttttctaaacgcattaaagccatcctatgcccctccaatcgcatcaagcggatcaatctttagaatccgccaaattgagaataaagcgccaatgactgtcatcacaagtaaaacagcagaaaaggccccaattagtaaaggattatttgtatacggcaccgccgctggtaataccaatgttgtcaatgcgttacacaacaaaccaaggccaatcccaatcacccctaagaatacagattgccacattaaactaccaactaattggccacctgaaatcccttgtgctcgcataaccccgtatacggccgttttttcaatagtaataatatacatgaaaatcccaacgataaaggcgacgatgactagcaatgcgccaatcatcaaaccaaacgtcttaacctgtggcccataccccggaatcttatcgattaattctggaattgtcagtttggtcagctgatccgttgtcttaatccgcgcgtttccctttaatactaaagcattaatgcgcgtaatctgatcagtgccgtagcgcattcggctaaaatcggtcaaccgcaaataagtcaccggttgcgtattatagcggtggttcgtcgtaatcccaacaattttgtacttttgttgacgcccattcaatttaatttgttgatttaaagcaattccttgtaagccgtcgtcgaccacaatctcatttgcctttttaggataccgtcctttttgcaacttaggcttcaaaaaaacatcaaaatcgataccaaaaacactcgtattttgcttacttaaacctgaaccactcacaacacccatcatctgagcaagttgcgcatgatttttctgtgcacctttaatagagggtaattgatcaacatctaattcagaagcagccaagtttttattcgcatactgactaataacaacttctttggcgtgccattgatcaattgccgaacggttattattggctagcccatatgccaaccccgttaaaaaatagattaaatatgcaattagaaaaatcgtaaaaatgatcaatgaataacgtaatttagcatgtttaatttctttaattgctaaatacatccaaacacccctttcttaactgttttaatctaacataaagcatcgtgccttgaacagcaatccgcattcaatcttttattcattcacgggaatatgctatgataagcacacggaggtggcgcttatcaaacacgttaaacatgggattgcctttttgcttctgattatcatccaacaagttcctttaatgattgtcagtggcttaacattgctccctaaggctcaacagacaacccatctaattttagtctttggttggctttttctaatcacaactatcggcattactgccctgatgtggtattactaccaaaaaattaaatcaacgcgttatgaccaacccttcaccaaacagacttggtggacaatgttgattggctttatcgcgatggttgctgtcaataacggtacaatcccgtttatgcatactaccggtaatgccaatgttgatgcactaacctcagtctttcagacgattggtattttcatgctaccatacgccctattcttaggtccgattatggaggaattacttttcagagggttcctaatgaattggtttttcccaggcacaccaatcatctcaatcgggttaagtgctatcttattcggattgatgcacggcgcaactgatccgatttatttcatttcaaaagcactgcttggcctaattctggctatcgtctactatcgcacctataatattaagagtaatattgccttacacatgttgaataacattactgctggctttacgattttttaaacgactagaaaggaagcatgactatgtctgcattaacaaccatcttaacttacatccaagaacatcctgatgaagtggttctagaaccgtttcaatatgcgaacgtgattcgctttggcattagtgaccaagtcgatctgccagatgccgagaaactgttccctgatatgcggctacacgttaaccggattgaccccgagtacgtcaaagaacaccatgacttattgacgactttttatcaacaaaccgaagaaaaacaaaaagacggcttccaagatgtgtggattactaccgcccatcttagtgaccgtcaactttatttagtggatctttcttttgaataagcctcattttgaacagctaaaggtcagctgtattaagtatgctattttaaccttgtttctctttgtcatgcgtgcctttattgcgcatcccatcattctgattgccagttggattagcactgctgtttgcggcgcatatttcattgccatgttaattgtttattattacggctaacgttgcatatgtttggtctcagcaatcacttcttctgtaaaatacaattgaaaaccaaagaacaccgtcaacataatcgcagctatccatgcagtgcgcacattgattaacttaacaattaaccctgagctaatagtaccaatgaagaagctaccaacaattaacccgaagtaccgggctttttgttggtagtttttttctttggtcgctaaatatagataagtattttcaattaatttcttataattgccggtcgtaaaagcattcgcatatggatagccattaaccgttgaataactcgctaattgcatggccatcgacatcgacagaatcggtgtcacaaacatgttgggaatcgcggttgataaaaaaccaactactactaaagcaataatttgaaaccctaataaccacaaccgccaaacattcaacccaccagtgttaaaatgccgcttcgccagctgcacaataataaccccaaacccaaatgaaataatgggtaatatcttttcaggaagttgtgcccactggttcgttgcgatatctaagccgatgaacacgatattaccggtctgtgcactcgcaaagacgccaccacgtaaaatcacacaatacgcatctaagaagccaccaagaaacgttaaaaacatcgccgtgcttagccgatcatgaaaccctatttctttttgcaacccaatccctccaaatcaatactcttattatacgcaaattaaaattgaaatcaaaaaacgaattgcactatttcacagtcgaaataaggtacaatccgctttacactataaattaattgaattgacatcttgaccatggaccacttttctaaagtcgaccagtcctaagtccaaaccgcgcagcaatacttcagccgtcccgacgttggttgccaacggtacttcataaacgtcagataatcgaattaatgcattcacatccggttcgtgaggttgagcagtcaatggatctctcaaaaagattaccaggtccatcttattttctgaaatcaacgcgccaatttgctgatcgccccctagaggacctgacttaaaccgtgtaatcggcaagccagttgcttcaataattttttgaccagtcgttccagtcgcaaataattcgtgttgcgccaaaataggtttataagccgtcgccagtttcacaatcgttggtttctgacgatcatgtgcaatcaatgcaattttcatctgaatccctcctaatgtctgcggtgtttaaccaccgtaaaaaagtgtaacacacttgccaatagaatgaagaagattaaaacgaacgacacataattaagccaaaactggccaattggcaacactaagttcactaattgttgcagtaccatcgtaatcaaggttgcacaggcgaccatgccaaatagttgtatataccgtttcactgtatcatccgtcctctttgctttagattgaatgcttgcgccgacttggcgacattccgcttgtttctgcgctgaaagtgtctttaaaccatacgtttttgtctggacaacttcccggatttttaaaagtccagctgcccccaagactttatcaaaagttctaaaagtcccgtcagtcacaccagtaaccaattcctcagctggactggcataacaactactaatcgtaatgtaacttttgcctttgaagcgatctggtaacgcatctcccgcccgattaaatcggactaaccgttgccgcacgcaatccaaaaagttcttcatcacaccagacattgcgccccaataagttggcgcagccagtatccaaacatcggctgccaataacttagcttccagttcatccaataccggattggctttgccagtatctggtaatatttgataatcatttaaaaagatcacttcaacgtcatcttccggttttacacctgctaaaacggcatctaaaagttgcccattgaccccatctcgttgatgactgcctaacactcctaaaatcttcatctgatcaagcctcactctttatactactttcagtttacacttccaatcactaacttaccataaaaaaacgcccagaccaatggcctagacgttgtcattattttagtttagtaccaaccattacttaaccagaagctcttagcggcatcccatgaaccataacgacttgttacatattgatctgcaacgcggtcttggttagctgctgaataatcaccatttaagtatgaagctgataattgataacggccgattaattgaccgttacgtgctgaatatgaaccgcctgattctttttgtgcaatccattccttagatgaactcgttgtagttgttgtttgtgcagctacaggtgcttgttgtactggtgcagcttgaactgcaggttgtgcttgaactacaggggctggtgtttgaacaggtgcagctacttgttgagttacaacaggggctggtgttgttgccacttgatcagcatcaattgttaattgttcaccaacaaagatcatattaatatcagcaatattattagttgttgcgatttggttaacaagctctgtactaccattgaatttttgcgcaatggttgaaagcgtatcaccatttgcaacggtataagttgttgcggcactggcttgtgattggttaatgaaaagtaacccggttgttgcaacggttgttaaagcggcactgtaaagtaaagtttttaaagatttcatattttgaatggactccttattgtttaaattgatttttctatctgtttaacgtgggactaatataccatcttaaatccgttagtaaatatcaaaaccataacaattgatgacaaatccgtaacaaaatgacggcaatttcacctaactttgtaatgaagcccacaatttaattgacatgtaatcggcctaaaagctaataacaccaaggattacagtcaataaaaatgctaaatatgctattttgaattaattaaccttctttcaaaaataatcgccccatttaacgtaataataagacgaggtgatcaaaatgaaagttttaaaattaaatgatttagatttaaacgtcgcattggatgatcgaatgattcaaatttccggtgctcaggacaaaacattaattttcaaaagtaagctattagcacactattggttcttcaatttacgggctttagctaagattgcggatcgctatgcgatccaaatcatgtttgagacagagaactacaaataatctgccctatcgatatgaagccacaaaaaaagagctgattactcagctctttctatcttaattgggtatatagggctcgaacctataaattccggattcagagtccggtgccttaccaatttggcgaatacccaatatcatcaacgaatactatgatactgcacactccagacgttgtcaattatgatttttaacaaatctttaaaagaggactatactattcttggaggtggttccaatgatgaaaaaagcagaaatcgaaaaattatttgacgggaaagttgccgtatatgatcaagaccacgttgtgattgattggatagattcacgcaggacgcttgaagtcacaattgataacgatattctaaatctactgataaaccatcaggactatattcggaatatcttgaaacatttaaagagacaaacaaatcgcaccatgaccaaggaaattgttaacattaatcgttgtaactataaaatcttcatttagcctctctagagtcaattaaccattgacattacaggctttattcgctaagatattagttgttccgaacattgcccgttggtcaaatcggttaagacgtcgccctctcaaggcggagttacgggttcgatccccgtacgggtgatatttaaaacagcctagaacccagaaaagccgttaaactaaggtttagcggcttttttgtttatttaaaacgtgtaaaaaagctagcctcctgacgctttagttagggggctagtttttttattgcgtagatttcttctattaaaatggcttcatttgccacaattatttggctaccaaaccagccactgattaaaccttccaccttactgggtacaataccttctattgaacgttctgctttgtcgatttgaaccggataacatttaacaattgcgtcattgatggtattagcaatcatctcagcagtcatcgcctcaatgtgtttttcattgcgcttacgatcttgtacgcggttattcttatctaacactgccgtatgatcgcttaaatagaacccttgccatttcatcatgccacgatcataataatcatacttcaaaaattgattaaccaaattgggatcatattcatcattattcataggcgttccctccagcatgcccaccgactaagccagcacgctcaattgcagtcgcaccttttactttgctagacaatttgaccaccgatgtaaaaccgtagcgcttgcgaatttcatcgaccgtgctatctaatttctgctttttcaaattaataaactgtgtgtcgaacatatctaattgttccgcactatcgtcaaccaaattgctgcacgcaatactaatatgccgaatcgattcgtgttgccattcttcacgaaaaagttggatggcatgttttgtgagttgctgattagcattagtcgcatcaatcttcattgaacgcccaaaaccaccacgcgatgcaccctcttttgcagcaaatgaaaagccaatccccagactgataaccgttgtcgccttgtgatgcgccctaagacgtgcagccacttgctctgcaatttcccgaatcacaacttcaatctcagcttggataaaataatcacgtggtaatacctgactattcccataagacttctctttggccttatatttatgccgcacaacggcccgatcaatcccccaactaaacgcaaacaactgcgcgcccatgacacccatttcttgttttaaccgatagggatttgtatgcgcaatatcgtacatcgaatgaatgtgtttctgattcagtttctctgccgtacgatgcccaattgaccagacatcatctaactgggtcactggccacagtttatctgggacatcttcataatgccattctgcaatcaaactgtgattccgtttggcctcaagatccaatgcgagcttggcaagtagcggattatcgccaattcccaccgttaaataaatgcccgtttctttttttacagccagctgaattttacgtgcgacttcgtacggcgtcgctccaaagagttgccaactatccgtgacatcaagtaacgattcatcaatggaatacggttgaatatcttcttctgccgtaaattgctgaaaaatacggttaatcttctggttctcttggatatacaaattcatcttgggtggctcaatgattaaccgtttatcatgaattggaacatcccgggcacgtgttacgttactgataccaaataatttcttagccatgggactggctgccaatactaaaccactgcccgtgtttttctccgtggacatcaccaccaaaatagcctttaacggattcagtttcaaccgaacggcctctactgatgcgtaaaaagatttcgaatcaatcattaaaatcacgcggcgtggttcattctgatagtcatacacgactcttcaccccaacttgaatctgacgcacttgttcatctaattcgcgttgccaccgattaatctcaatcaaggtgacggctgatagatgacgataaataaattgcggaaacttatcgcggttgtagtaataattcattgagtcaatcaaatcatcactatgattcaccgctaatcgccgcaattctaaaactccaaagccatttaaatataaactcaatcctgtttgatctagcgtaatcacttctttattcgtatgcatcaggcacacctctttaattcatcttatgtcctcttaattatacgaacatacattcgatttagtcaagtgtgatttctcagagaacaaaaaacgctcaatcaaattaaatttgattgagcgttaaaggaaccttaaattttaataccaaccgttacttaaccagaaactcttagcggcatcccatgaaccgtaacgacttgttacgtattgatctgcgacgcggtcttgattggctgctgaatagtcaccatttaaatatgatgcggttaattgataacggccaatcatttgaccgttacgcgctgagtatgaaccaccagattctttttgcgcaatccattctttcgctgaactagttgtcggtgcaacagcaactgtttgttgaactggtgcagcttgcactgtaggttgtgcttgaacaactggtgctggtgtttgaacagcggctggttgtgcaacaactactggcgttgtcgtttgaacaggggttgctgtttggtcagtgtcgattgttaattgttccccgacaaaaatcatgttgatatcttgaatgttgtttgttgtggcaatttgattgactaaatctgtgttaccggcaaatttttgggcgattgttgataacgtatccccagttgcaacggtataagtagtagcggcacttgcttttgattgaccaacgaaaagtaatcctgctgttgcagccgttgtcaatgtagcgctaagcaataatgtcttaaaagatttcatgtaatagatgtgctccttgttgttttgatttattaacgtgggactaatataccatcttatattcgcttgtacatgtcaaaaccataacaattgatgacaaacaggtaacaaaatgacggcaattcccgcgctaattgtaatgcacaccgcttacttgactgctattacacaaataacgcctaggacaatcttctgtcctaggcgttataaactaatttattgatgttattcacgacgttttaaatgatacttagagaccgatttttggcggccaagaactagcggaatacgttccacgaacacatcactatagtccaatccaaaccatgaagccggtgtatcagtgaatttttctaaccataaacgcatttgaacaatccctttatccattgctcgaatttgagttgctggtgataaatcttcttgcatgatcacaaacgagaaatcaccaacgttccgatttggaattgttgtgtagcgttgtggttgtgctggtaattctccccgatgaatcatttcttgaatgatttgacgaataaagatgttcactttttgttccatcttaaagcctagatacaactgaacgttgacaatgtagtccgtcccaagcgtatctgcggtatattctgccgtatacggttcatcagtaacattgaccgcaacaaaccagtaaacttgcgcccgttttggtcgtttatccaaaatagaataaagaatattcttcttaaccatattcttttcatatggtttattctgtggttttgaaagataaaccaaattagtcgtatacatagctaacgctgtatcgtctcgcaaatcatgtagttgttgtttataagctagtaatgaaaccgtacttgccttgaaagtattactttccttaatcgtattactacgataccaaacaaacatgatcgatagaataaacgccgcaattaagactgtcacgtaaccaccatgcatgaatttagcggcacttgagatgaagaaaataacttcaattgtcccgaagaagatgagtaccaaataagccaatacccatttcttctcgcggcgtcccaagtaatggaatagcaagatagttgtcattaacattgtaatcgtaatcgccaaaccgtaggcagcttccatgtgcgctgagttcttaaaatagaaaacaaccattaaacaaaccgcccatagaatccagttaacgattgaaatatagagttgcccttttaacttagccggataatcgaccttaattcgtggtaagaggcgcaacttgattgcttctgatactaaggtatatgaccctgaaattaaggcttgtgatgcaataatcgccgcaattgtagccagtaaaatcgctgggacctttaattgggctggcatcacttcaaagaatggattgaaatcagaaatatgttgatatgccgcaatatctttatgttgtaataaccaaacaccttgtccaaagtaattcaacactaaacaaagcgcaatgtatggccaactaccatagatattcaaccgcccgacgtgccccatatccgaataaagtgcttcagcccccgtagttgccaagaaaacactgcctaaaattagaatccccaccttattctcagggctaaacagtagttcaatcgcataatacggattgagtgccttgagcatcgttagatcccccattaagttaaccaaaccaatgccaccaataaaggtaaaccaaattaacataatgggaccaaaagatttaccgattagatcagtcccaaatttctgaatgaaaaataagaccgataagatcgagaccgtcaataaaatcacctgatcttgattattaattaaaacgttcccattaattggcaaaccctttaacccttcaatcgccgtcgtgactgtcacagcaggtgttaacatcccatccgctaataacgtcgccccaccaataatcgcggggatcacgagccacttagcttgcttacgaatcaaagtgtacagtgcaaaaatcccaccttcaccattattatccgcccgcaatgcaatcatgacgtacttgatggtcgtcatcaacattaacgtccaaaagacaagcgaaatactgccgatgataaaatcgcggctgatgtttaccaaaccgccattcccctcaacaactgatttcataacatataatggcgacgttccaatatcaccgtaaacgacgcccatcgtaatcaaaatccctgcaactgataatttatgtccagttgtttgtttagttgtctttaatttcatgatttgttacttccttatactccaatatagcattatcgtagcttgttccagattgaaagtccagtcttatcatcaataattatcaatccactgtattccatgctataatagggacactgaaacaagcgagggatacaaatgaaagataaacgtcaatttgaaattgctaagaagcaatacaagaaactagcgaaccgaccactatcaaaggaacgtaagaaagctgttagtaccgcttcaacttacatgttcacaatcttagttgtggcctttattctattggttatttacttgttcgttcactaaaactgcgtaagcagtttttttttacgtattttttttgcagaacatatattgaatattatttttcgtacgtatataattgaataaatagttttttaagcttaaattactacaaaaaacacgaacattatcgagaaaggcggctctcatgccctcaaaaaaacaagtttatctcgctggcccattttttagtcccgaacaaaatgatcggttagatcaagtggctgatttactcattaaaaacccgacgattgatgctgattcacttttcaaaccaggccaacacccttatcctgatgcagaattcggtactttcgaatggcaagtcgctacttttaatgttgatacgcgtcaaattgaccaagcagacgtcgtagtcgctgttatggattttaaatctgaagaaggcgaattcgaacctgattccggtaccatgtgggaatgtggttatgcttttgcccacaataaaccagtgattctcgctcgtttccgtgataatttaccaattaacctgatgttggctggttctgcaacggccatcttcaatggtgaagcggatattgaaaacttagcgacttatgatttctttgaattacacaataaatatgttcaaacagatatcttttaactcaaaaaagaaccgactgatgcgtcggttctttttctttggcctaaaagccgttattctcgctcaattcacggtaccatcgaccactcttcttcatcgtgcgctttacctcatggtccaaatcaacacagtagaaaccataacgattccgataaccatctaaccaagaccaacaatcattgaaggtccaagtatgatatccaaaacaactgctgccggcttcaattgcacgatgtagttgcgtcagatgttcttgcataaattcaatccgataatcatcttgaatttgcccatcttcacccataaagcgttcttcatcggtaacacccattccgttttcagaaacgtaccacggaatgttgtgataatcatttttcatcatcattgccacatcgtacaatgcttctggataaatctcccatccacgatatggattaatcttccgttctggccaaatataattagcatataagtcttccggtgtttgtgctgggaacttcggattctctggtgcttgaacccgcattggttgatagtagttcacgccgataaaatcgacacaatgatcggcaatcaattgccggtcgccttttttcgtcattggtaataactcatgttttgttaagaggttaattaattcttctggaataacgcccaaaacagttgggtctagaaaactcttagcgagtagtaagtcagcattttgtttagccattaaatcctctggtgcatcactcttagcgtaagctggcgtgatatttaaaataatgccgatctgactatccggcttcacttttctaaattcagcaacagctgctgtatgcgccatcaaggtatggtagccaacctgaacagccttcttgaagtcaacaatgtctggataatgatagcccgttaagtaaccacattcgatatgcacgataggctcattaaaagtcgtccagcgatcaaccaaggcaccaaacaattcaaacgcagtttttgcgtagaatgcaaaggcatcaactgattcgcgtgtctcccaaccgcccttttccattagccaccaaggcatatcgaaatggaacagattaatgatcggtgtaatgtctgcatcacgtaagcgcttaaaataatcccgataaaaatcaaccgctacttgattaacatgtttgccatcgggcattaatcgcgtccaagcaatcgatgtccgaaatgagttcaaaccaatcttttgcatattttcaacgtcttcacgatacaaccgataagtatcactagccgtgtcaggcccttgatcgctattaaacttatcaggttgcatctcaaaccatttgtcccaggttgatggggacttaccataacttagggagtatccttctgattgaggtgcggatgttgctgctccccacataaaatgctctggaaatttaatcataaacgctactctccttaaatgtaatcgccaacattttatattgtaccatttctctaaagtggtcgcacacctttctcagtcgattatttaatatgcgtacctccgaaatattatacacgttaaataaattgtagactgagattaataatatgcattattataaaataatttatttttttagggttttacacgtaaaagggttgtaaacttccgttattttatgatatattcaataacagaaatgattaatactcccccaagtaagatcatttcaatattcagaagatactcggtataggcctttcccaattaaggtttatgccgggtattttttgctttgaaagcaaaaaaaatagtcctgacggactatttttagaagcggtttgttatgcaaaaatcatttggaaaatacctgcaccacagatggcaccgataattggtgcaacaactggcacccaagcgtaactccattgtgagtcgcctttgttcttaagcggtgtgaacatatgcaccaaacgtgggcctaaatcacgagcaggatttaaagctggtcctgttgggccacctaatgaagcaactaatgtcatcaccaataaaccaacaacaatgtggccggcagcgccaaacttacctgcaccaattgctaaagcaccgaaaactaagatcaatgtgcctaaaaattcatttacaaaaccattcatccggctatgagcagcatcgattgttacgaatgagcccaagatgccttcttggtttgttgtgcgatcataatatggtttgtaagcagcaaccaataataattgaccaaccattgcacccaagaattgaacaatgatgtatggtaaaacattttcccaagggaataagcccatcactgcaaaacttaatgtaacagccggattaagatggttaccggaaatgctcccaaacataacggcaggaatcataaccccacaaccatatccaaaagcgattaaaaaccaatcactactaaaaccttttgttccttttaattcaacgttggctactgccccgttaccaaaaataatcataattgcagttccaataaattcggcagccaaacgggttgtcaaagaagcgtccactactattcctcctataaatgattcatatttttacgtatcatattataatacgggaaaatgcaaggaaaaacaattgacttttctgtttaaatccctttcatgagaagattcatatttttacagacctttctgtaaatttgacttgctaatatctcataaaatgggataatattcattgactaaccgtattaaccctgattatccgattactgttttggaggttactatataaacttaatactcgccatcgttctttatgcaggccttgctgtctttgcatttggcattatcctgctcctatttttcttaatttttaaaaaacggcttaaagcccctctaattatttgcttgattggtttgattatcgcggcatctcctgttggctataacttctacatggctcagaaagaacaccgcgaagaactagcgaagattgaaaagaaagataaaaaattcgataaagctgaacgccaattcatcaaacatattaaaaaatcgactgttgccactgaattcatcgctcaaaagtataataaagtttggggcgagttaacagaaaacggaacagttaacgtcgcaaatgttgattataacgatcatgatagtgctgttgctgctgaaggtcggcgtttactagcacaaggaaaactcgatgacgctgatgattactatgtcagtgctcaaggtgactaccaaaaaatgaaagactacgcgactgataacaatcgccaagaactcgtttatgccaaagatgtcttatccaagactgggtcgttcgtctctgttgcaacccgtccaaacggaactttccaagaatacactgatgatgtttacaaggctaatcaacgacatgtccgcgcaattcagaagttgaaattttcttacagtagtattaaatagtgaatatggtgattttgaaaaaaagatgaaatgggttacaatgaagtagaagactggggagtcttttattttttgattcatagttaaccctattatcgattgggagtgtgagaaatgcgtcacgtcaaattattattcatgattttaggtctaacttttattttaaccgcttgtgggaatccggttaaagcaaagctccacgaaacaaacagtggcttcaatgcgcaaatcactggtaagactaaacataaaaaggtttattggcaaatcggtgataccattcatacgactaaaacaaccgatgatgctttcgcattcgaagtcccttacaaagctaagcagtaccggattacacttgctgataatgaagaaatgcgtaatccaacttatgttgaaggccctgtcgcaaaagaaattgtgcaatggccgaactttattcagatttataatccgattgcccaacaaaaaggactgggcgttttcgaagcgaatccacttgaaggcattcgcactgatcaagttgacagcaacaacgtgattgccatgaacgtcagtgatagcaaagtactggggatctcaattaaagctctcaacgcaggtaagaatctaacgtttaaaaactacgtcctcgccttttcaacaagtatcggaaccaaaccaacccagattactgaattggtcgaccgctcacttaagaaacctgggtcattaatgcaactgacggatcgcgaagttcgctataccgttatgacgaccaataacaacaagcaacaagtcacacaactttcaattaatcatttataaaaagaaagccgccgaatctacgattcgacggctctttttttatatagtggttaaaaaatttcgggagaaattattcacattcttattatagggcgcagttcaatcaaagtaaacgatacggtcggcacaaattagtggtgccaaattgttatagtcactcaaccagctatcccccatcgaatttaaagtgcttatttacggcatttcttcgtttaaaatgctatattgaaggtaaataaaggaggtcttttttatgtttaattatcagcatattcttatcggtttagatggttctgagttatcagaacgcgctttcagtgaggcgattgaaattgctaaacgcaataatgccgaattagttgtggctcaaattattccagataccctttacacaaatgcacgcatgacttaccctactgaaacaacgacatctgaaaaacatttcgttcaatcgtatcttgatcaaaaggtgcaattcgctaaagaacacggtgtccctaacgtacgagccatccttaaagtgggttcgccacgtcgtgaattagcctttaccatcccagaagaagctcatattgatttaacagttctcggtgtcagtggtaagggcgcctttgagcggctcttaatcggttctgttgcacaattcatcagtgttcattctaacaccaacgtcttattaattaagccttaagccggtttaaagattggttaagtttaatgctttgtttttgacgtgtcccatttctaatatataataaaggtagtttaggagtggttcgaaatgccgtttgatatcactaaattgtctgatcaaaatattaagcgctggttcttacaacatcgccaagcaatcgttgcaacccttttgcacccaaacacttggtgggcaagttttaatcgccaattaatgcgctttttccaataatcactaaaagtgacgactgaatttgccgtggtcactttttttaatgacgtttttttaaaggagttctgaccgatgaccgagcaaacttatacttttacagcctcaatccaagccgcgacgattggtaaaggcggtgcatatgtctaatttcctggcgatatccgcgcaatcttcgggaagggtcgtgtaaaagtccacgcccttttcgaccaacaaattccctatgatggcagtattgtcaatatgggacttaaaaagccagatggcaacatttgttacattcttgggggccgcaaagacatccgtgcacaactcaaaaaagaaattggcgattccatcacagttgaaatccgtgagcggctatagctattacgcccctttaaatgctatactattttaaatatttatttcgtcgactaaatttagaatgaggattatcaaatgccaaaacacctttacaagcgcgtggcagtcgttttaatactgattaccaccctttttttatggcttttcacaggaccgaccagaagtgaggccgggatttggttcttccataaaaccacaccccaaaaaattgttaagaaaaaaacacccaaaaaaacgatgctcgacatcacacccatttcacaatttcctgaattaccaaccggttgtgaaattacggctgttgccatgctgttagattaccgtagcgttgacatgagcaaaacagaagtggccgatagtatcccttatgtcaatgatggcgatatggaggtcggcttttgggggaatccatacgatgatactggctacactatgtatcctcccgcttggacaggattcttctatcaatatctcggcagtttcaccgatttatcggacgaaccgattagcacgctcaaagctactttaaaacaaaagaaaccaattgtcgcttggattaactaccataaacaaccagcgcattccgtcttattaattggctatgatcaaaattcatttacctttaacgatccatataccggcaaacgaaaaaaaatctcatttgataaattctggaaaattgctgcaccacagggacaccgtgcaatgacttattaatcattaacttgggggatttaacatgcataaacgaaccattgcagtcactttcattactttaagtagtctttcattagctagttgtcggtcaattaaacctgatcaacaagccgcaacccactccgaaagtttagcacgctatcgcgcctcatcagaagcaaaagaaagcaatcagcgtcgatcaatcgctagctcgaaagaagcttctattaaacaacaatcagaaagtatcgttgcagcttcagaatctattgaacaagcaaaacaacaatctaatcagtcaacaagtgccaaaaaagcgctcactgccgaccaacaaacttctgttaatcaagcttttctagcgtgggcggctgaacgcgccacaatcggaaacatggccgtcagtgattggtattttgaccacggtgctgccggatttggcgattggtttgccaattcacctgatggccgcattttagttcaacctgggacagcaagcccagggtttaatgcctaccctgttcatgcaattggtggctgtgtcttttataccgctttggatggaacagtcggtaaagacaatttagatcgtggatcattcgcggataattacagccttaacatggcaatggacaaaccggttagcaaatacctacttggtgataacggcgtcgtgtatgaacttaaattaggtaatggtcacctcacatcaactaatgatggtttcagcgaactaaaagatgacggcaaacaagcttactcagaaccacttgtctttgccgtttctgaagacaccgctgcccaagctgaactaaaatctttacttgctaactattagagtttaaaggagcacgactatgaacaatgccgaactacaggcctatcttgaagaacattcccgcgtcatcgatacatttcgagccaaaggtttagactaccaaaatgaaaagaaccaaaaacgccaacctgccaaacgttggaacgagaataaggtcgatcgggccgttgataaaatggtcgccgaatttatcgctagtattcaagtgaaaatggcattcaacattcgtggtgaacacgccaaagaatatcaaacttggttaacgttcattgaacaaaatgaagttgtcgaaggcttggaagaatcggttaatgaaatggcgtttgaatattagaaaaagtagtttcttttaacgaataattttccgaaaagtaattgcactggataatattaagggcgttgaattgttaattatccttgtgattttcttatcaatattatatgatttacttacgaaaggtggttttaaattatggttaagttattctttaacgagggctcaaaaattacgctccaacaaaatgacacattatctgcctttggttctacaaatggttcacgccataagttgaccatcagagactgtgctgctgcagatatcgtcgcaaaaatctcgcactttgttaaggacacgccggcttttatcctcgaaaatagtcctagcgaaacttatcacagctcaaatctcattatgattactacacgttaattaaaagactgccgttgggtggtcttttttattttataactcaaaaacgccgctctcttgagcgacgtttttctttcagattaactttattgatttaaataattatataagctgcgcatggtcgcatccgccaacgttaatggctgcccatccaacgtcacctgcttaattgcgacgtaatcttcgaaatcgggtacttccagttgttgatttgcgacaaattcagccgctttttgataaaccttttcagcgttcgtttgaccgttgagatattgaatgactaacattgccatcatctccatttttacttttaatattattgatgaattggtcatctttgataaggtcattatacttggcttactaaaaataagcaatttatatattttattctttatccgtattaaacaaaaagcatttaatccatttattttagaacaatgcaccaaatactgcaccatttcataaaatcaatagactaaatgctttaataaaagtcgaattttatctttataaacgttgaattataggcgttcgtttaattctttgcctaattcttcaaagccgggtttgcctaataaagcaaacatgttcttcttgtaagcttcaacacctggttggttgaatgggttgataccattcaagtaacctgagattgagacagccatttcgaagaagtagatcatgtagcctaatgtgtaggctgtttgatctgggatgttaactgacataacagggacgccgccatcagtatgtgctaagacaacaccttggtaagctttcttgttaacgaagtccattgtgtggccttctaagtagcctaaaccgtccaagttcttttcgtcagttggaatatcaatgtcgctgttagggttcacaacgttgacaactgtttccatcaagttacgacgaccttcttggatgtattgacctaatgaatgcaagtcagttgagaagttagcacttgaaggataaatccctttttggtctttaccttcagattcgcccatcaattgcttccaccattctgagaaatattgcaatgttggttcgtagttttctaataattcggttgtgtaacctttgcgataaagaatgttacgtaaagcagcatatttgtatgcatcgtttttcataacgtctgtatctgtgtattcagtgcgggcatcagctgcacctttcatcaattggtcgatatccccaccagcaacggcgattggtaataaaccaacggctgttaatactgagaaacggccaccgatgtcatcaggcacaacgaattcttcgtagccttctgcatctgattctgtcttcaaagcgcctttagcacggtcagttgttgcgtagatccggctcttagcttcttctttaccatatttcttgatcaacttgtctttcaaaacacggaaagcaattgaaggttcagttgttgttcctgattttgagataacgttgattgagaaatcgcgatcgccaatcaagttaactaagtcgtttaagtaacttgaactgattgagttcccggcgaataatacttgtgggaagtcacgttgttctgctggtaacatgttgtagaacgtgttattcaagaaatcaattgcagctttggcgccgaggtatgagccaccgataccaattgcgatgaaaatttctgaatcgctcttaattttagcagcagctttcttaatgcgggcgaattcgtccttatcgtagttcactggtaaatctaagaaaccacggaagtcgttgcctgcaccagtgccttcacgtaattgtgagtctgcagcattaaccattgcttgcatttctgcaagttcgtttgattggacaaatttgtccaaacgggatgcatcaaatgaaatatgtgccatatttgtcttattcctcctgtttttaaacacaagtatacgttaataactttagcttttttagcgctaaaaagcaagccagatcgaccgctttttcagactagaccacctttattttcaaaagaaaattactcaaagtccttgacttgtttcacccatcccgctatacttcaaatcatcaaataaaacggaggttactgaaaatgacaaacactcacttagtacaattgaatattcgttggcaaagccgctaagtgagattgtatgccgttatggatacagtcttttgattgtatccatgcggccattcatcagtaatcgattgaattttaagcctacatggattttaactcgaggaaatccatgtaggctttttctgtcccctacatgactgtcatgtgggggacttttttgtttgataataatgagtgcgttcaaaccgggtatatttcgaacactagcctagtggtgcgaatgaacgacgcagtcggtcgtttgtgcgacgtagctaggcacaggaatacggtttgaaaagcacgttaaaaaatagaagtgcgtttgaaacggtttgactctgagcattaacctaatttaccaaattggtgatgtaatcaccagtttagtaaatgtagttaagcacaagagtcagtttcaaaaagcacgttaaaggagctttcgccatgtctaaactcaaacgttttttacccctcattctaatttttgggagtttgctcaccctacttggtatcaaaaaaatcaaagaagccaaccaacctaaattgccaattgtcgggatttcacaacccttatctcatcccgcacttgatgaaattcatcgcgggattgtcgctggtctggcaagcgaaggctatcataacaaccgtaatatcaaaattgattttcaaaatgcgcagaacgatcaaagtaatttacgtctgatgagcaatcaattcgtcactgaaaaagccaaagtaacggtcggcattgccacccctgccgcccaaagcttagccaatgctactaagcaattaccgattatcttaggcgccgtgactgatccggcgagtgccaatctcgttaagaacaacgcccatcctggtgccaatatcaccggcgtatccgatcaagccccgattcgaaagcaattggcattaatgcaaaccatcatgccgcaactgaaaaccgtcggcattctctattcaagcagtgataactctgccaccagtcaaatgcacttattcaaacaacttgctgaacaaaaagggctgaccgttgttgaggccagtcttagttcagtcaacgatctggaacaagtcagccagaatctagtcccaaaagtcgatgcaatttacgttcccaccgataatacgattgctagtgcaatgggcaccctcgtccatgtgaccgacaaaaccaaaacgccagtctttccatccgctgaaacgatggttaaagatggcgggctcgcaaccgtcggcctaagccaatacgacttaggcgttgaaaccggtaagatgaccgccgccgttttaagtggtcgttcaaaacccgcaaccactccaattcggtatttacgcaaaggacatttagtcttaaacctcaaaaaagcaaaagccctccacatcacaattccgcagagtttaatgcaaatcgctaatcaaaaaggagctgttctcaaatgaatcttattatctcaaccattgaccaaggattattatggagcctactaagcctaggcgttttcatcacctttcgaatcttaaaattccctgacatgaccgttgaaggcagtttcccgttaggtgcagccctcagcgctttaatgttgcaacaacataacattgccttttccttattagtcgcattcatcggtggctgtttagccggactcgtgacggcaattttatacaactacttccatgtccagagtttgttagccgggattttaacgctaaccggtttgtattccgtcaacttgcggattttaggccaagccaacatggcaattggtgatcaacacaacctatatcaactgccgctattccatcaattaacgctcgatcaacggctcttagtcattaacctagtcatcatgctgatcgccctattattactggctggcttactctacaccgaattcggtcaatccctgattgcagctggtgataatcccacgatggccctctcacaagggattgccgtaaagcggacgaaaatgattgggatcgtgctgtcaaacggcttgatcgcccttgcaggtgggctcgttgcacaatatagcggctttgctgatgtcaacatgggcatcggtgtgatggtcattgggttatccgcgatcatcattggtgaacggctccttgtcggcaagcatttcatcgccaaactaattagcattatcctaggaagcgtcgtctaccgcctcatcttactccttgtcttacaactcggctttaacgccaatgatttcaaactcttctcggccgtcattttggccatcttcatcatcgcaccacaacaaaagaaaggactgactaccaaatgaccccgcgtatgactttaaaccacctcaattttgaagttactgataataatgaacccaaacaactcttaaatgatttaaatctcacgattaatcctggtgaatttgtcgtcctccttggcgcaaacggtgcgggtaaatcgactttttttaataccattgcgggtgatttaacccccacaagtgggcaactactattcaacgaccacgacattacgaagcaatccgcccaacaacgcacacggctcattagtcgtgtctaccaagatcctaagttgggcaccgcagctgatatgaccgttgccgaaaatattttgttggcgatgcgccgtggccaacgccgccgcttatttccccggcgtctcaagcaacaactcccacaaatcaaagcgctcgccaagacactcccgaatcacttggatcaacaactcaatcgcccggttagtaacttgtcgggtggccaacgacaaacgttaaacttcttgatggcgacgattcaaaaacctgaattgctgttattagatgaacacacatctgctttagatgcagtttccagccaagcattgatgacttttaccaatcaaacaattcgcgataaccaactcacctgcctaatgattacgcatgatttagaggatgcgttgcaatatggcaatcgactcttggtgttaaaagccggtaaactgattgccgacttgaacgcgactgaaaagcaagcattaactgtcgatactttactagactatttaaactaatcaaaccgcgctaaccattttcggatagcgcggtttttgctgcttaaatccattcaatcttatcaagcaccaatttatcagcggttaattaattaaggatatgattaacctacgtttaacacttgtaatcgttttctaagtatgctaaattattcccataaggttgtgcgcaacctaattattgatttaagggagatctgtataatgacagttactactcaaaaaactattccagctagtgttgctatgcttagagttatcgaatcttggggcgttgatcatatctttggttaccctggtggctcatttaactcaacaatgaatgctcttaatattgaaaaggatcgtttaaaatatattcaaattcgtcacgaacaagttggggcccttgccgcagctgctgacgctaaattaactggtaaaatcggggttgcttttggttcagctggccctggtgcaactaaccttttaactggtttatatgatgcaaaagaagatcatgcaccagttttagccttgattggtcaagtaccaagcaagaacatgaactacaactacttccaagaattcgctgaaaacccaatgttctctgacgttgctgtttataaccgcctcgttatgacacctgaaagcttgccatacgttgttgataaagcaatccgtgaagcttacaaacacaatggcgtcgcagtggttgttattccaaatgacttcggctacgttgaaattccagatacaccatatagctcaagctcaccttcagatcgtaaaaaagtggctggtccagtcgcaacagacgaagaagttgatcaattcttagcaatggttaaagacgctaaacgccctgtaattcacgttggtcgtgggattaaagacggcggcgataagctcgttgaattatcaaagaaacttcaaattccaatcgtcatgactgggcttgctaaagggttagtgcctgatagttatgaaggtaacttaggcatggctaaccgggctgcttctaaagcggctgatgaaatcatggccgttagtgatcttgtgattgccatcggtgctgacttcccatttgccaacttaatttatcggacacatgacttcaagtttatccaaatcgataacgatgaagcacaatttggccgtcaccatttcttagacttcgggatctggtcagatgcaactgcttttgttgaaaaagtaatcgccagaagtgaaacggttgccccaacaccattcttcaaagctgctgttgctgatatggcaaactggcaagcctatcttgatgttttaacgaaccgcgactctgatccgcttgaattcgaaccaatctacaaagaaatcaaccggattgctgaagacgatgctgtcttttcaatcgatgttggtgataatatcatcaacagtttccgtcacttgaacttaacgcctaagaacaaatgggtgatttctgccctctttgcttcaatgggttcaggcgttcctggtgccttagctggtcaattgagctacccagatcgccaagtcttcaacatctcgggtgatggtgccttttcaatggtcatgcaagacttgatcactgaaaagaaataccaattaccaatcattaatatcatcacatcaaatgccgcattaaacttcatcaagagtgaacaagatgatattccaatggattactcaggaatcttcattgaagatcaagattttgccatgattgcgcaagcaatgggcattgaatcaatcaccgttcgttcttctaaagaattacccgctgcctttgacaaagcccttgaagtcacaaaagctggccgaccattcttaattgatgctaagatcactgacaaacggagtattccagttgaagaattagaactaaccattaaagatggtaagttaacagaaacaattagcgcaagctatgatgcttctcgtcctgctggcaaagaatacagcgtggctgatttcttcgcagaatacgatggtcaatcactgaagacattaccagaattatttgaagaaaacggtgttgaactataaaacaacccggccatcataaaaatagcgtctcaacacattgcggtgtgttgggacgctatttttattgatttaatttttggtaatggcttctttaggatggaaccaaacgacgttcttgtcgaagaatgagactaagtcgtttgataagtacaagatataggtgaagaataagacccaatttgagccaccctgcattgctgtaatgccccacaacgtgattgatacgatactttggatgaaccagaagtaatagctttctttaaaccgtaatgtggtcaacagtgcgccagtaaacccaactgaagcggcgatactatcgatcaatggtcgtggactgtccgtcatattgctttcccagagatataataacccaactgatacaacaaagaacaatagcgtcaacgcccaattacgaagtcctttaccacgagtagcaagcccccggacttttttatcaacgttttgcgcccaatctggcattaataagactgggatgtctaacataataatgtagacggtttgtaataccatatcgttatagtttttagcattataagccacaataatgtagattaatgcagagatgacaccaaagacaccgtttaaaggtttcgtattcgtaatactaatagtacaggtgaagcctaacatccccgcgagcatcgttaaaaacgacacgccagtcattggaccaccggaaatagtagcagctaaaataaagcctaacccaaacatcaacaaaccataactggatgttgtccaccctttcatctgttgaatgtaccacttaggattaaatacactggtgattgcacgattgtcctgcattgaactgaacccctctttatatgaatttaattatcactccagattgtcaacaccattttccatatattgatgtgccatctgacgaaacaacactatatatggtacacgctaagcattctaatttaaactcttgtatttaattcaatttgtggtagctaattttaaagcctttttgaaagtgccgttaacttacgattgcaagcgctgaactagaccattcgaaaatattttttatttttagcgttcgttgtcaagactcaattcaatctttgaccaatggcttaatagtctctttgatcaattgaccggagaatgacttcattaatgcccacattatctggtgtatcgatggcgttcattacggcattagcgacatcggttgctgttaatccagtttcagtttcactcttgagaacagctgctcgtaattgcggatcactaatccggctggctaattcggtttgcgcatgtcctggagagattaacgttgatttaatgcccattccaacttcttccacacgtaacccttccatcaccgcgcgcattgcatatttagtggctgaataaacggataagccttcaccagtgaaatgaccggcaactgaatccgtggtaatgatatgaccactcttttgctgttccattaaaggtaaggcatatttaatgccatatagcgcacctttgatattaatatcaatcatagcctcccactcatcgactttaccatcgcgtagcattgagacgggcattaagccagcattattgaatagcacatcaattctaccaaatttagcgattgtcaattcgattaaggcttgcatgtctgctaattgcgtcacatccgtttgctgataaataacctcagtgtcgtattgagcggttaacgccgccaacgcacttgttcgtcgagccgctaaaacaagttttgcacctttggctgctaataaggtggccgtctctttaccaatcccacttgatgcaccggtaatcacaacgactttattttgaatatcattcatttcttttcccctcactttttagttgataaggttagtatatcgggtacttcgcaataaacaattacgcactttcaactaactaacgcacctcaaagtaagttttgtgaaatcactaaaaagacgacaacattctttttgaataaatgttatcgccttctttaaatatcgtatttctcatggtctcgataatccaactgcacatcatcaccattgctctgtaaaaagtcgattctatcttcgccccacttggccatcattcctaggacggaaaccaatgatttgccgtacgcagaaatcgcatactccacgtgtgggggttcgttagaaacttttcgagtaatgatgccatctcgttccaattcacgtaattgatcggttaaaactttggctgaaattccctgaacgactcttttaagttcggccggtctttgaggtcctgccacaagatgacagagaatcaacggtttccatttcattccaatcactgataaagtcattaaaacaccgttggtataatttttttgtggctcgttcaaggcctttcctccacttcttgatgctgatttgtttgtctatcataccatcaaaaaaaggatcaggacaatcttatctgtcctaatccctgattaattattctggtcgataagccgctttagcagcgttcatcgccgaccatgccttaggccagccgatataaaatgataaatgcgtaatcacttcgacaatttcagcttcagtaatgccgttttccttatcaatctttaaatgcgctggtaattgttcaaaattaccacctgaaatcaaggcactgatggtgattaaactccgttgatgtgctggtaactctgattcacgcgaccaaacttgcccgaataaaacatcgtcgtttaattcagcgaatttaggtgcaaaatcacccaatagatcgcggcctgctgtttgtttctttgccattttaaaaacccctttctgaattaaagtgcgtcataaagcgcatttgaaacagcttctaaccattctggtgtgccggcagtgatggcgacatgactaaaccagctatccttaatggccccatgccagtgtttgatgccgtctttagtaacaatcacatctcctgggactaagtgttgtgctgctttaccttcttcttgataccagccttcgccaccagtcaccaatagaatttggtacccagcatgatggatgtgccaattgttccgacaaccaggttcaaacgtgacattcccgacaccgacattcacgtctggttcgttcactaacattgataaataactttgaccgacgaagaagtcttgataagccacattagcttctccaactgggaataattgtttttcttttaattgttcattcttaaccattctaataacctcactttattaggattcaaatcgttgtaaatacgtttcaaaactctctgcttgatcgatactctgatccaatttaccatcataccaatcaattttacgcgttaggatctgtaaatttgcttggcgctcagccaattcggcttcagcttgagcctttgttttttgcaataaagctttgcgcgcttcaatcgtcgcgtctccttgagcccgcaatgcaacatattgctttaattctgtaatccgcataccggtcccttttagatggagtataaacccgacccacttaacgtcctctaatgtataaaagcggacaccggccgcatcgcgttgcggcataatcaagccttggtcttcatagtaacgtaatgtgtaagtcgacaaaccaaccaatttagcaaactcgccgattttgtactgctcttgtgccatcgacatccctcctacaaaaatagcttataccttagagtatactataaggcaagttttttaataaataggacgatcgccatcaatattcggctgattaatgccccaacttgccccaattcctttttcaggatgattaactaaatcaacaacaacttgcgcgatactccgtcgtgaaataatcgtccctttaaacggtgttcccttttcagttaattcgtaatcgatccgatcttcattggtcatataggcacaacgtaaaatggtatagttaagcgaagattgttcaacaatcttcgccgcccgccgcacttcatgaccgactgcttgttcattccactcaccaaaagcacctggcacttcatgatacaagcctaatccactgatatagattaatcgtttgatgcccgctgcagtcattgtcgcgacaacgttttgcattaatggttcgaactgcccgcctaaatttgcgtaaacgatatcgaccccagctaaactgtctgccaacagctcttgatccaacacatcaccttcaataaccgtgacatgtggattttgtgctaatgcgcttagccgttcagcgtgccgtaaatatagcacgagctcatgttgattttctttcaacagttgctcaataactaactgggccacttgtccggctgcccctaatactaaaatgcgactcattttaatcaccccttcttcaatgtctttagcatattccttaaagtacactcgaaggcaagccatttttcaaatttaattggtctaggttgctacttgactttcaaattaaattgactaaaatgaaagttgttattaattataatcattataaagtaataaaaagtattggaggcttcaccttgtcaaaaaaattatcactcgcccaaaaaattaacgtgatgcgggctagcgtcatgggtgccaatgatgggattttatccgtcgccggaattgttatcggtgttgccggcgctacaagcaatagcttcgccatcttcatttcgggaattgccggaatgattgctggaacgatctcaatggcgatgggcgaatacgtctctgtcagcacgcaaaaagacgcacaggaaatggcaatcattaatacgaaattgaatttaaacagtaattatgcgtctcagatggcttttgttcggcaaaaatacgtcaacactgggattgatcctgaacttgccgatcgggctacacacgaaatgatgactgctgatccgttgacgactgtcgtacgtgaaaaatatgggtttgtcccgactgcttttaccagtccttacgcagccgctgttgcgtcattcatctcatttccaatcggttctattttgccactagccgcaatcaccttattaccccaaaccattcgcgtgcaagccaccatcattgcagtgatgattgcccttgcgctaaccggctacagtgcagccgctctcggcaaagcgaatcgttcaaaagccatgttgcgcaatgtgctttccggattattaaccatggtagtcacttacgctattgggacattattcaaacaataatcgcttagaaaggatttttttatgacccctcttaaagccccactcaaaacaactgaaaaaccccatcaaacgatggaagaaaagatgaatacccttcgagccggcgttctaggttctaatgacgggattctaaccgttgtcggtgtgctctttagtgttgccgccgcaacaaccaataatttcaccatttttatcgctggacttgctgatttattagcctgtgctttttcaatggcggcgggtgaatatgcttcagttagttcgcaaagtgacacggaaaaagccgctgttgccattgaacaagcacgcttaaaaacagctaaagatgatcaaattaaagaagtccaagctttttacgaagccaaaggtgtcacttctgaaacggcactcgcaatcgctaaggacttaatgcataagaagcctttagcaacaattgttaatgttaaatatgacctagagcttggccattatatgaacccgtgggccgcagcgtttgcatccctcttctcagccgctttcggtggcgtcttcccccttgtgacaatgattctactgcctgaagcctacaagatgaccggcacaatcattgccgtcaccatcgcggtttccattaccgcgtttatcagcgctaaactgggcgatggcaaagtcaaagtctccattattcggaacatcctaattggtttaattacaatggccattcactacgggattggccaactcttctaaagaaatccgtcatcatttgttctaatctaacttaaattcagccacaaaaaaaggcgtcgagcttaaattaacttttagctcgatgcctttttgcttatctaattttagttctcaagaactgggcaattttttcatggccagcatcattgggatggagactgtctaaactcagctcagccgcttgttgtgcatccgcaaatgacaacgctgattcgttaaacaaactgatatgctgaacgccaaacaagtccgtcacttgcgcaatcgcttgttcataattttgttgctgataaccgccttgattgacggccgaaaagaagtcagtcccaatgtgaacgtgcgagataaaataaaccgtcgcttgtgggtaacgtttcgtaatctgcccaagtaatttttgtagtgcgccgtagaatgttactgtggactgatcaccaaattgaccaagtggtacatcacgaccaaagtcattcacacccgcataaatcaataataaatccgttgattcaggaatggcttgccagcgttcaaccatcggatcatacggttgggcaatcgtcgaccccgaaattccgagattggtgattgtgggaattgtgagccattctgctaaccactggtagtaccatttgtgtgcgtaatgattacgttgatccgtgatgctatcaccaagtaccgttaaatgttgatattgtgtcatttgctacttcgctcctaattctgagtaatccgtcagttgccaactaaattgatcccaataattggtttgctttaatgttttaagcgcattgaattcggctagccgattcgtcgtcagacgactcttatgccgtaactctgccgataaatacccaatatggcttaagatcaccggcgtacctaccaaatttttctgcgtcagttgccgtttgatttcctgtggcgttaaatacggtgtttgttgcgccgttatcaacgtcccagtcgttaaaacggcatattccgacattaatagcaggtaggccgcttgttctgtcggtcttaaatgcgccgtttcattgcgaacagggacatgatacgtttgcgctagttctagaacaattgcatagatttcaggcgttaacgttgccacaaaatggtgcgatgtcaaatgcgtgagttgtaacccactctccaaaaagcggtcaatctgcgcttgaaactcacgcttaacatcagtaatggccaactgttttggatgagtttgtaaggtttgataagcatgacaaaacccagccggggttaccaagctgggaatcgtcagtggctgactaattgggcggtctttgtcgaggaccaagtgcaatcccattgccataatcccatgttgctgggcgagtgccgcactcatttcaaaatgaggcgatgtcacttgcgcattagtggtagaaatcacgccagtttttaagccagttatgattgcgcgcgaaatcggtatggtcatcccgaaatcatcagattcaataatgattggttgcatcttaacccacctattctgccgctaagtcgaactgtccaataatggtgtcagtcgtaactgttgttggtagtggctctgctggtgcaaaggtggcgttgctgctgacgaccatgatagtcgttgccttttgggcggctgctagttgttgccagtcaatatcaacaatcgcttcgccagctttgacacgatcacccgcttcaacgtgcatcgtaaatggcgcgcccttcaattcaacggtatcaatccccatatgaatcagaatctcaacattttgttttgttgtaatcatgatggcgtgtttagtggggaaaatcgaactaacaacaccatcaattggtgcgctaatcgttgtttgccgttcatcaggggtaatggcaaagccatcgccaactgccttgcttgcaaatacttcatcggtaacttgttcaattggtaaataactgccagcaacgggggctgttacctgtccaactggtccttttttcaaaaaattaaacatcgttcttcctcttttcttaaacccgcatcatgatagcttcataaggtcgtaaagtgatttgctgaccatcaaactgcggttgttcgtaattatccatgagcacgtccttgacgtgtggtattgaacggacttgtgtttgaccagtaaaattagccatcacgcgaatcgtttcagtatctaggtgtcgttgataagtgtaaaccgcttcgtcctctggttcaaataattggtagtccccttcaattaaaactggcataagcttacgcattcgcactaattcttgatagaatgcaaagacactattgggttcatgaatcttagcggcaactgagtaatcatcgtgctcaaccggcattaaccatggtgtcccagtcgtaaacccgtgatgcgccgtttgatcccattgcatcggaattcgacagttctcgcgtgatttctgctgtaaaatcttaatcgctaacgcttcatcaatcccatcgcttagcatttgatggtaagcattgatggattcagcgtcttgatattggtcaatggcggtgaagttcgcgttcttcatcgcaatttcttccccttgataaatatacggtgtgccttgtaagccaaattcgactaatgctaataatttagcggattgatcgcggtattgaccgtcatccaagaagcgcgaaacggcacgcggctgatcatgatttgaccagaataatgcgttccaaccaccaccggcagccatccccgtttgccaatcactaagcacccgttttagatcagacagccgataatcgcctagtgtccattttttgccaccggtataatcaaccttcacatgatggaaggtaaacgccatcgataactcttcacgggctggattggtataacgaatcgcttcatcaattggggttgaggaaagttccccaaccgtgacaaattggttcgggccaaagaccttttcgtacatttcatgaatgtattcgtgcacatgtggtccattcgtatagaaattgcgcccatcatcgcttggcgttttaaacgtatcattcgggaagtctttatccttcgagatattgttaattacgtctaaccgtagcccatcaatcccaaggtctgcccagaattgcatcattttaaaaatctcggcccgcaagtgttcattccgccagttcaaatctggcatgctcttttcgtataggtgaagataatattgatcaagtgctggcacatattcccaagcactgccactaaacttggataaccaattatttggttcgtgtccatctactggatcacgccacaaataataatcatggtacggattatccttgcctttaagactctcttggaaccagcggtgttgatcagaagtatggttgaccaccatatccatcatgattttaatcccacgtttatgggcttcatttaagagtcgttcaaaatcggttaaatcaccaaaaatgggatcaatgtggtaatagtccgcaatatcataaccgttatcacgaccgggggaaacatacattggcgtcaaccaaatcaattcaatcccaagattttgtaaataatctaaccgttgaataatgccgttgatatccccgattccgtcaccgttggcatcttgaaagctccgcggataaatttgataaactgttgctttttgccaccatgccatacgatatctctcctatttcagtcgtttattttgctgttcctggtttttgtggtttagccattgcttcaccagctgtcatttgatcgttataaccccaaacgagcgttacaataaatggcacaatcgttgcaaccgctgatgatgcaatgaaaatccataagtttgataaatctgctgggtgttttggatctaagaatgatgcaaagccgatccacgaccccgcgaaaccgaacatattaccatggaataacccactgacaaatccgccagcggctgaaccaattaaaccggcaatgaagacgcgtcggaacttcaagttgaccccataaatagcaggttctgtaaccccacagaatgctgaaatcgcaccagcaaatgataattcttttaaagctgttttacgggtcttaatcgcaacagctaaaacagcggccccttgtgcaatcatcgttgtgcttaaaatcgcgttcaagtaactgtgacccgttgcggcaacatcgttggcaataattggtaagatcccccagtgtaatccgaagataacaagcacttgatagaatccaccgattaataacccagataaccaaccactctttaataataagaattgaatcccgaatgctaaaccatttgataaccaaataatagcaggccctgtgatgtaaagcgtaatggcagaaacgactgcaatcacaatcaatggtgtaaagataatttgtaagtagcctggtaaccagcccttaacccatttggttaatttagcgaccaaccaagccgcgagaatcattggaaaaatcgaatacgtgtagttaaccattgggaagtttaatgacccaatttcaagtaaagatttcccgtttaaagccactaatgaaggatgcaccagaacaccaccgataacagcggttaaaactggatcacccttcaatttcttagcggcagtgaacccaactaacatgggcaagaagtagaaaacagaatcacccatcgcacttaagacgatgtatgcttcactcttagcacttaatagcgccccaagttgtggcatcgttagcattgccaagacaccttttaaaatcccaccagcagctaagataccgacaatcggactcatcgcaccggtaatcacgccgattaattgattaaaggcttctttaacatggccccatggcgttaaattttgttggcgcgttgttgcagccacaacttgggccgtttcatcttcgtcagcaaactctgtcccgatttctgcaatcacggcatcataaacggcagtgacttggttgccaatgaccacttggtattgcccagaggccttttgaacgttaatgaccccatctaatgctttaatttcttcggtcttcgcttttgattcgtcctttagataaaaacgaagccgtgtaatacagtgaattaaactatcgatattttctttgcccccgacaccggcgacaattgcctgtgcgagttgtgaataatccttttgagccataataattcctcccgaatcttattgaattaaaagtagcatgaataaaagcgctttcttagtacaccgtaatcatatatcatgtacgtacaagttgtcaaacctttttaaaaccgttttcttgttagcgcttaatctaaccttgcaacttcaccgaatccccgttatgataggaatgagaaaacaaattggagaatatcgaatggctaaaaaatatgaaatgatttatcgagatctcgtgcgcaagattacgcaccaactctatcaaagcggcactttcttaccaagtgaaaatgaactcactgaactctacggtgcctcgcgtgaaaccgtccgtaaagcattaggtagtctacttgaaaatggctttatccataaaattaaagggaaaggctctttggttctcggtctagacaagtatgcttttccgatttcgggattgaccagttatcgtgaattagatagtcttttcgatatgcatactgacactcaagtcttgcaattaacacagacgaccgttccccaaacccttttccatcttgaatctgaagagcagttacctgccacttacattcaacggctgcgcgtcgttaacggtcagcccctggtaatcgataatgactacgtcttaactagcatagtcccccacatttcaaaaggggttgcacaagactcactctatcgttactttgaagaaacactcaaactcgaaattgggtatggcagtaaggagttcacggtgattcccgccactgaagaacagtgtcagatactgaacctaccgcctaacagctccgtagtcagtgttaaaggtgtcacccatctacaagataataccctccttcaattcaccgaatcgattcaccgtgccgataagtttaaatttatcgaacatgctcggcgtaaaattatctagtcaaaaaaaacgacacccaccggctgagagttgccagatgggtgtcttttttttatttgaccgcctgtgttttaaaaacagcgatttgatttaaaagttcactaatgcgtgttcgatcactcttttgttgttgacggctcgttgtgagtttctgatataagtttaactcatcaccctcgttgaaggcggtgaccatggcttcagcggacgagacgtaatcagtcattactaattgtaactgacggttaatttctcgtaattcttttggcggatttagtaatgtgacttgatcaataaattgtttaaaaacccgtaagttacgttgaaaatattcgtttaacgattccaaattttcgcccaccagacagcgccctttgatgatgttcttgctggtccgggtgtactcactaaatactgtttcaaacacgataaaccgttctaaaaattgattccaccgtacgatgtattcctgagtcgatagttgatccgctttgacactcatggtcgttccccctttaatataatatctaaatgcctatcatgagtataaatatatactaaatacagataaaaggctaattattagcctttgttaccgataacgatttcaaattgcgtttcattttacaaataaaacatgacgtcctatagttaaggcaagccaaaaaaaggatctgattacttgtccaaccaacgttatctatctggaacagcactaaaactatttatattcaccctactagccggcacgttcacaatgtctatcagccaatctgccctttcaactgcttatccaactttaatggcctattttgatttatcagccacaactgttcaatggctgacaaccggttttatgctcgtaatgtgtgtcatgatgccgattagtccttggttattaaacaacatcccattcaaacgactctacatggggattttaagtttatttactattggaacgctattaattgtcttcgctaatcagttcggttgggtattgttcgggcgggcgttggaagccatcgcagtaggtgttttatttccatcgtttcaaactgtcttattaaccattactgctgaaaatcaacggggccaaattatgggcctggctggtttagtaatgggctctgcactagcttgtgggccgattatttcagggattattctcaactacttcagctggcgaggactattcatcgcctttattctgattatcttaaccgtgttagcaacagctaacttcactatttctgatgttatgccggctaagccctatcaccttgatggtctttccgttttatgtacaactggattaatcggtttattatatgtcatcagtagcgctaatcatcccactatcaacccaatcgggctctggggtatcggattagtgagctgcctagcactgggttattttgtctaccggcaactcacccagacaacgccacttcttaatttacatattctcagttaccttaactacgatattgcggtcggattgactgctatttcctatatttcattgattgtcaccacagtcatctacccattatattttcaagctcaattgaagttgacgccgcttctttcaggattagcattggtccctgctgccgttgtgttaagccttttgaatccactcgcgggccggttagctgataaaattggctttaaaccgaccttactcgttggcctaaccatgattagcattggatggctagctttgattggcttctaccaatggctgtcattaccattgatgatcctgtgtgcctgtttcatcgaaggcggcaacgcatttgtcatgatgcctgctgttacacttggtgctaatagcctgccggatcaagtgctcgctgacggcactgccgtcacaaccacgattcgtcaaattgcgggcgcgctgggcgtcacccttgcaactctccttttaagtgtcgccggttaccaagtcgtatttattagtttgctcggcctgaccttaattggtcttggcttagccactcaactacaccccaaataagccacaataaaaagcagattagcgatgatgattgtcatcgttaacctgcttttttaataccagcgttgcttaattaagataagtccccatgtcattaaactaaatgttgaaatgatcgcgccgataattagtcccggcgcacgatagactaagcgaacttggttagtccctttctcaagtggcactgcaagcatattgcccatgactcgtcgtgtacgaactttttgatgattgacttgcgcatgccaaccactgtcatatggcacacttagataaagtaattgatcagcggtcttagctggtactacaccagcaatccgaccattatctgccgacagttgttttaggtcgatctttaagcgttgttgtgccaactgatcaaaagcttgatcgaaatgagcctggtttaaactagccacctgaatcttacgaaaggctttaggttgccgactggtaattgtcagcgttagttgttgccctttttgatagcgacccaaaccaataatcgtggtcccattcaattcaatcggtactttatgtgttcggccattaattttcactttcagctttgataagttttgttgcggcaagtatagataagcatatccacttgtcttaacttgcgttgtaaacgtaatttgccgacgtttttgcgcttgtaaatctaattgattatattgataaaatggtgtcgtttgtcctgtcatcgcttgcataattcgatcttgattttcaaacggttcatgtgctttcaaagccacgtgtgctagctggtcattaaccgcaaaccctaagcctaacgttttatggggttgtgtcacaacctgtccttgcttagcaattaggtcatattgattggcaaatagtaggtcagtcagcacagtatgcccaatcccgttaatccgccgggcattcttactataaaaaccgagattaaccaacatcgtccgcatccgctcatcaagtgtcgaagaataattgtttaatgtatactgtccaaaggtcaacgcatcattgtacccataatacggttccttaaacgctttttttaagagaatcgcttggttattaacgcgatagaaatcaggtgtttgccgttcaagctgttcaaagagtgctgcttggcgttggtattgttgcgcataaacaacttgatcgcccatcggtaacttagtggtcgtcaagcggccattaatcaccagttcactaaacgtcaatacggctcccagaccaatcacccatggttgccaacgtgctcctttttgccacgctgcaaaaataacgctagccaaaaccattagtccgattaacaaccagagcgattgtttctgcacaccacgtacatgtggcccatagtagagcgccaactggccaatgctgagcaagccaccgactatcaaaataaccaggcgtttcgtttgacgtttaccgattggttcaatacttgcttcataggcaattttgatgagaacaaatgccatcaaataggtattccgatatggaaacccttctggttgctggaacatgtgccacatcgtattaaatgtcgttacccagaaacttaacgctaaactaacaattaaaaagccgttcgaccactttgcttgccgtcgaatggttggtagacagaaataatagaccgcaaataacagcgctaatgtactgataaataaagttggttcatgaattaagcgttgcgtataatggctgccgccgacttgaaattggctcaaaacttcccagccaaactgcggggttggataaaaactggttgcagcgattgtctttttcccagtcttcaacattccaagtaacgacggcaataatacaactgctgttgtgccccccgcaatcaatgaggcccaacaaaactgccagatagcctgccgccagtgaaccactagttgccaccaagactgttggggttgtttccatttgattaacaaactaattgcatacaaaacggcaaatagacatgacatataacccaagtaatagttggtaaagatagtggcaaccaacatccagatatataagccaggacgcccttttaaaaatagccgttctaatcctaagatgaccagtgggaggaaaatcagagcgtctaaccacattaggttataaaagttcattgccacaaagccacttaaactataagctgttgcaaaaattagcgcggaaaaatgatattcaggctgacgcgtctttagaaaatgggccatcgttaaacccattgccccaatcttcaaaataatgacatacccaaccaccactggcaactggctattcgaccaaaataggagcagtaaattaaaaggactgattaaataataagccgctagcggtaatatatcgccacccagtgaaagcgaaaatgaatacgtactgaaattcatctgggccatttgccgtttaaactctgccaaaaagggcatatattgggtaccgagatcactaatcaataaattatgccgtccaaatggcactatttggagcattgcatatagccccaccattaataacatgggaactagcacactcaataaatagtaactgacagctgttttatttgttctcttcatctgactcacttcttttgccttttttatagaataatacacactctaaacaaaataagccacccagacaatttgtctaggtgacttattagtaagttgcttacttcatcataccgagggtgaccccaccgacaatgactaataaacagccaagtgtgacgtaaaccatttcttttttcgttttttgttcacccaataggtaaatactaccgattgttgagatgataatgccacattgtgataatgaatagctaattgctagaccaatatcattcattgaaatcaacataaataagttcccaagaccccataataaaccagtactaatgttgagtgctgttttcttattgaagaccgctgtcccaatgccaacaccggcaaagattgcagcaccgacgaacattccaattgcttgtggtaaaacaattgatgttgcgccaatgtgtgaccagttaacgatgattgtgtaaccaccataaccgattgttgataagattaatgctctaaaaccacgtgcaaattgtgtatcttctttagcagcaacactgctcttcggatccttcattgaagttaacgtggcaccagcgattaagatcactaatgcagtaatcccgaagatgtaatcgtgcgttgtcttccattcatggaataacaaagcacctgctaaagtgtttacaatcaattgcatcccggttgataatgggactgtcttagaaacacccatcgcttgcattgattggaactgttgtccttgaccaatgctccagaataaaccggaaatgataccgattaccataatccgtaagtttaaagcgggttgtaatactaaaaaggtaccgattccaaaaaccagcgcaccaattgtcattcctaaggtttgttgataggcattcccgccaagtttgccactcactaacccgatactaccccatgcaagtgcagggattaatgcaattaaaatagccatttataaattcctcttcttctctaaagtacaagaatccattatacatagttttatatccgctggctagtaggaaaacggcaccattcaatcgttactagccttcactaccgttatgtaagcaactgtcccagtcgtgattgcgcttacgtaaattttacgtaaaaaagcgttttttttagtaaaaaaaatcaacgataagcgttttcttaccgttgatagccttaatgttttcgctttgcatgttgtaggacttgatataacaggacgccaatcatcacccctaatgtattaaacatgagatcatcaatatctgccatgccagttcctaaaacaaactgggcggattcaatacacagggataacagagccccttcaataatcgtaatcaaccgatcccctttgcgctgtgtcaatgaccgtcgcaataaaccaaacgggataaaccacgcaatgttcccgtagaagttataccaataatcaatctgggcgggcgcttgccgtaacttgaaagtctcaacaaacggtgtcaaattaatttggctaagtggtcgttgcaaatggaactgcatttgccacggataataaatatgccgtaaaaccgttaacgagaccaataaggcaatataaaacacaaataacaatagtttcagttctgggagaagctgtattttgcgtcgtttcattaataagtaccccaaccggcacacaataaaaaccaaacaatacaaaatcgtcttatctaaactctccaccgtcaatttgatgagtggtaaatgattatactgttccccccaagggaggatccattgttcataaatacgcccaagaaataccaaaaaaccaacctcacttattccactaatttaacctatctgttcattattcaatgagtaattaagtccattatagctgttttttttcaataaataacgcttaattactcgactaaagtgaatcttaaactattaggtatcgactgcccaactttagcccgatgtgtgcctactgtgctatgctataatagaaattactataacttgaaacaggagccttttatgaaagttctattatattttgaaagtgaaaaattactcgctaaatctggaattgggcgggcgttggatcatcaaaaacgcgcgttaaccgaaatggggattgactatacgcttgatccgaatgatcaagattacgatatcttacatatcaatacatacggactcaaaagccgcagtgtcatcaaaaaggcgcgtaaaatggggaaacccgtcatttatcatgcacattcgaccgaagaagattttcgcaactcctttgttggttccaatcaactcgctccatttgttaaacggtacctcgttagcctctatcaacaagccgaccacttaatcacccccaccccttattcaaaatcattattggaaagctatggtctaaccaaccctatcgctcccatttcaaacggcattgatttagccaagtatcaagccacaccagctaaagaagccgcttttcggaatttcttccatttaaagcctgatcaaaaagtgattatctgcgtcggcctcttctttaaacgcaaagggcttctcgattttgtcgaaatcgccaaaggtctacccgaatacacctttatctggtttggagatgtacccatgtacagtattccagcaaatattcgccggattgtcaaacaggatcatcccgacaacgtcatcttccctggttatatcaaaggcgatattatcgaaggcgcgtatgccaatgctgacttatttttcttcccttcttatgaagagactgaagggattgtcgtcttagaagcccttgcaagtcatcaaaaagtgttggtgcgcgatattccggtttaccatggctggcttgccgatcaacaaaactgctacatgggtcacactaacgcagaattcagtcaactcatccaagcgatggtcactaatgccgttcccgatttaacagctcaaggctaccaaactgcgcagtctaagagtattacagaaatcggccatgaattacaagccgtttatcaacatgttttggcgccagatcaactgaatccaaagtacgatgccatcatgcggcccgcgaaacgttaagtttctgtttaaactttaaactgctatttgcgctaatgccgccctcgggttaaaataaggcattagcgctcttttagttctgttttttgaaaggatgtcacattatttgaaactcacaaaaattaaatcattcctatccacgagattaggcttcatgagtttgttagtctttttattttggctaaaaacgttattcgggtacttcaccgattttaacctcgcagctagtggcttcttacaaattgctattttaatctttaatccggtcgcgacgacgctccttttattcggcatcattctttatgttcgccagccgcatctcagttattggttgggcttgattatctatgccgccaacaccgctcttttatattttaatgtcatctattaccggcaattcaccgattacatgaccatcaacaccatcttagggtattcaaaagtttcggctgggctcagcaaaagttcactggccctcatgaactggcatgatgcgctgtattggattgatattattgtcttagccttgctgattttaaccaaggtcatcaagatcgacaaacacgcatttaatcggtggtgggccttcagtattacctcactggccgtcttattatttggcatcaaccttggcttaagtgaaatcagccgacctcaaattttatcacggacgtttgatcggaactacatcgttaagtacctcggcatcgacaccttcaccgtctacgatgctttcaagactactcagaataatcaagtgcgtgcccaggctgagagttacgacttagatccggtgctcgactttatgaaagagcattacgctgcaccgaacgctgaatacgcaggcgttgccaagggcaagaacgtcattgtcattcatttagagagttttcaacaattcctaatcgactttaagttcgaaggccgcgaagtaacgccatttttaaatagcctctatcatgatcaaaatacattaggttttgaaaacttcttccatcaagttggccaaggtaaaaccagtgatgccgaaaacatgatggaaaccggcgtctacggtctaccacaaggctcagtctttacaacgcttggttcggataacaccttccaagctgccccatcaatcctcaagcaaaacggtgactatacgagtgccgttttccatggtaatgtgggcaccttctggaaccgcaataacgtctacaagaactttggctacaactacttcttcgattcttcctactttaacaccgatcctgataacgtcttacaatacggcttgaaggacaaattattattcggtgaatcgattaagtatctcgaacagctacaacagccgttctacacgaaattcatcaccgtcaccaaccattttccattcccattacccgaaaaagacggtgacttcccccgtgccacaactgataatacagcggtcaacaactattttgcgaccgcccattatcttgaccaatccctagaagagttcttcaattatcttaaagcctctgggctctatgataattcaatgattgtcctctatggtgatcactacggtctttcgaattctgataataaggccttactcagtgtattaggccgcgacccagaaacgtggaccgactacgataacgcccaactacagcgtgtgccttacatgattcacatgaacggtttaaaaggcggtatccaaaaacaatatggtggcgaaatcgatgcgttaccaacaatgcttcacttactcgggattgataataaaaattacgtccaattcggcaccgatttattatcaccacaacatgatcaagtcgtggctttccgaaaccataactttgtcactcctgattacacagtactcgatggcaccatctacaataatcaggatgggacagaagtaactgaaccaacagctaggttgcaaaaacaagtcgctgcttggcagaaacaagtgaaccacgaattgagtttgtcggattcagttaacgaaaagaacctattacgtttctatacaccacaaagttttaaaccagtgaaccctgccgattataactatctgactggctatcaacagcttgtcgatattcaaaataaattaggggctaattcaaccagtttattctcgcaaaatggtgatcaatcgactgttgggctctttaaaaccgatgctccagaattagcgggtgatcaatcaagcctcacggaagtgccaaaatcaaaggccctgaaaaaagagtctgatgcaacagcaactagcgatacggaataatcgtcaaaaaaaaacgcaaggacaacatatattgtccttgcgtttttttgacgttagctaatcacctgcgattgaaaactattaaaaacggattcctgagtcgttgtcatgattacgataatttgaaactgcgctgctaccgctctgacatcatttaataattggcgagcatccgttggtggaagttcatctaagaaatgcttgaccaccacgagttgctggtggcttgctaaaccgcgaatcaattgaatccagaactgatcgactggcggtaattcggtgcccaataaactccgactgcgctttaaatgctgttcaatcaatatttttaacgttggtgcaagctgctttttaggaagcaacaagttatcccaaccggacataaaggggagaatcttaggcgcctcataatcaatgacatatgggggttcaggtgattcaaggctctgctgaatcatctccggttgactaaaatagacctgtccaagtgctaagggttgtttatttagcatttcaatcacgcctttctcattttcctaaagcgagtaacttggcaccaaccaataatgtagactggtgcaattagactgataaatggtgcccatagttgggcgaatacttgattggttaaattctgcttggtgctctcatgcaaaatcggattcaataacgaatgactactaaagtcagtcagatgatttttaaataacggttgaaatgctcggggaccttgtattggtcgcaacggcttttgtagccactgttgattaatcagctctaatccgcgccaatagtaggaattgactaataaccaacctaaaatcactgtcacgcttgcgctgattagtaagcaaagcgccgttaacgtataataattgacaattgtatgtcgcgaccaattcgcactagtgaaagtatcgatatcctgacgcatcttcttaaacgcttgccaagtcaaaataccaatcacaagtgcgataacgatagtcagcactaccgcgataaattgatagcgtcccagtaagacttctttactttgaaccagatgtgtcagggggttagtcccctctttagttgtgttaaagttggctaattgctttttcaactggttgaggtcatgtcgttctaaactgatcaagctcagcgcaatcagcatgacgcctaaaaagaggcaatccacgagatagattaacaaagattggcgtaaataataccgaatattagctggaattgatttaatgaagaacatgacccacctcctaataaagatagtgtaaaactaaagtatgaaaattatatgaactctgtggtaaaaattaaaaaaaacgccttaattaagacgtttttttagttcccttaaattgtcttttcttttctttgaatcattaaccaataaacaagtgctgtcagccccattgcgataaacgttgcccccgtataagcgtgaataatcgcgaattgatttaagaccaagtagctgaccaccccaatgacccatgcaatcatggctgtcagatgatatcctttggtgtaccagtatggtccagcaacttcattgagcgcaccaacattgtagtgccgccgtctaataatgaagtaatccaccaagaaaactgcgatttcaggtcctaagaacatcccaatactatcaaggaaggtttcgaaagtggttaaaaatgaggcaacatagaccggaataaaggtcatcaccgttgccaataacgtcacgacccacaatgccggcgttaatttaaatttcggaaaaatattggttaaagccgatcccgcagccattagattcaccgcattagctgtcgtactggtaatcacgatcactaataacgctaaaacacctaaccctaatttggccgcaatggtgcttggatccgcgttgttcgggtcaaaatgatttaacgtaatcgctgtggcaattgtcgccgttaacccgatgaaagcaaaccagaacaggccaatattggcgcctaagaatgaatagcctgtggctgctttcttgttctttgaaaaacgactgaagtccgcagcagcggttacccatgcaaggttaaacgctgctaggatatcgaccgccttcccaaattcaagccgcaagttgctggctggtcgccacgccactaagtctttgaacggtaccattttgaagacaatgattgattcccaagtgactaagataatcactaagatgatgccaattcgttcaatccagcggacggatttttcaccgagcgaaatactgattaaatgcaggacagacataattagaatcccaacaatcaagctcatccggttagtggctgcatcgttgcctgaccagcccatgatttccttgatgatgaagctcactgaagttgctgcaatatacgtattcaccgcagcccaaccgatgaattgtaccacattgataatcgatggcaagacggatcccttcacgccaaatgaggcccgcgttagccccatcgcccccacaccagtttgataccccatgtaggaggccagtgcaagcaagacgtacgataaacagccaacaactagtaacaacgtagacccttgaatcaagccagttgccgcaataatgccgccgataaaccaagtgccgttattcgcatttgcaccaatccaagttgcgaacaaatcccaactgcccatcgttcgtgcgtccttggatactgcatgaattgtttgttgctttgtcattttgataccctccacttggttaattgcattaaaaaaagacctactcctagacagagcaggtccactaatgtacttgttaaccgctcctttgtcagcctcactggactgcccttaaaaggatttatatttataagcattgtattaaacttacttgccaaagtcaactcatgattgttatactcactaataaaaaaagcgaggttggataaaatgctcattcaaaacgtgcacattgagaatcaagaatcattgcagtcaatcagaattgaaaacgggatcattacagcaattgaggcacagctaataccgcatcctaatgagcaagtcatcgacggacatggtcaattggcattaccgccatttgttgatcctcacgtccatctcgattcaactctcaccgccggccagcctgaatggaatgaatctggaaccttgtttgatggcattcggatttggtccgaacgcaaaaaggatttaacccacgacgacgtcaaacaccgcgcaattcaagcactgaaattacaagccagccatgggattcaattcgtccgctcacacgttgacgtgactgatccagacttagttgcgctcaaagccttaatcgaggttcgcgaagaagtcaaggattggatgacgttgcaactggtagcctttcctcaagaagggattctttcttttccaaatggcaaagcattaatgaccaaagctgcccaattaggggttgatgcaatcggtgctattccacatttcgaatttaatcgcgaatatgccgtcgaatccttgaagtttgcttttgaactcgctcaagaatatgatttactattcgacgcacataccgatgaaattgatgatcccaattcacgtagtcttgaaacagtcgcgactctcgcccttgaaacggggatgaaagacaaagtgacggcttcacacacaactgccatgggctgttacaacgatgcctatatgtacaaattgatgcggctgttaaaaatggcggatttaaacttcatcgccaacccacttgtcaacctatttctcggtggccgttttgacacttatccgaagcgccgtggtttgacgcgcgtaaaagaactgactgccaacgggctaaacgtcgcttttggtgaagatgatattcaagatccatggtacccaatgggcgatggcaacatgcttgatgtgttgtatagtggcctactggcaacccaaatcatgggccatactgaaatcatgaatgcctatcgattcattacttacaatggtgctcgtgcaatgcacgtccttgaccaatatggtctcgaagtgggtaaacccgcccacctgattctaatggatagcgacaacttctacgaggctctcaacaagcgcgccgctgttaccctctcaatgcacgctggcgaaatcatcagtgaaacccaaccagctcaaacgcaattgcatatttaatctaaaaaataggcgtcacgacaatttaatccttgtcgtgacgcctatttaaattggtttagctttcacttgtcacaatcgtttcatctgggaaagttaaggtaaaagtggtcccttgttcaggaatactttggacctcaatcgtcccataatgtaactggacgagttggtggacaatcgccaaccctaaaccagattcaccatatttggtattcttacgtgatggatctgctttgtaataccgttcccaaatatttttgacttgttcgtccgtcattccgataccggtatcgctaatcgttaagattgtttcgtggaaaccagcttccgcagtcaccgtaatttgcccattttctgtaaactgaatggcattttgcatgatgttaaacatcacttggacaaaacggtcatagtcggcatagattgggacattctcttgggcgtccaagatgagcgtatcaccggcttcagtcgccttcttctcgaattgctcttgaatattctggatagcttccaccgcattaaacgtttgcgggttcaatttaatttggttagtccgaatcttttcataatccaggttctcgttgactaagcgaatgagtcggttggtttcattttgcattaatgaaatactcttggcgcgcatctcttctggaatcgcatcatattgcaacccttctaacagacccttaacggtcgttaaaggcgtccgcatttcgtgagcagcgtcggccatgaattgccgccggcgatcttcttgccgcttaatttcctcttcagattcattcaacgaatgcaccatctcattaaaatcggtggccaaatcatccaattcatctttaccaggattcttaatctgaacattaaaatctccttcagcaactaggtgggtcgcatttcgtaagcgattaatccgacaaatttgataccgtgctaagacgtaactcaacagaatcccaccgattgtcgatagtaaaaaggcaatcaagaggttcttgcgcatcgttgtcaaaccagatttaacggtttgtagtggtgctgccaccccaatcacgtaaatcagtttgttattgtaaaaaacgggtttgaagaccactaactgttcttgcttattgttattcacttggtgcgaatcacgacttaagctcagccgttgaatctggccattctttaaatgtttccaatattgtttcttgaccgaaactttaggatccggggtaggatacaccatctcgttttcggcgttaaagaaattaaacccaacgtgttgttgggaaaggatttgttgactatcaataatgaattgggtcgacaaggccgcttgagacccctgtttgaaagcttcacgttcaatcacatccgcgtaaccttctagttgatcccaggtgctctcataagcggtccttgtcgaatattgcgtaaacgcaatccccacaataataatggtcgtcataatgacgccgaaaaatgccaacatccattgataaataagcttcattcgcgcgctgcgtctgaatcatcaaatttataaccgacaccccaaacggtctgaatcacttgtggtcctactttttcaatcttttgacgtaacttcttgatatgcgcatcaactgttcgttcgtcaccgaagtattggtaatcccacacaagttctaataattgttcccgtgagaaaacttgacggggatttttagctaacgtcttcaataaatcgaattcttttggcgttaaatctaaaattggtttgtccaataaataagtctcacgcgttttagaactcaacttaaagtgtgttgtttgtacatcaaaatctgaattttcagccgcttgttgtacgttttcttcagctgcttcgacttgttcatcaatcaactcagcacggcgatgtaaggctttaatccgtgcaatcagtgtgattggactaaagggttttgtcacataatcatcagcaccgagttcaaggccaagcacttgatcactttcagaatcgcgcgccgtcaacataataattggtactgtcttcgacaactcgcggattttttgggcgacttgcattccgtctaaacccggtaaatttaaatcaagcgtgataatgtcccaactctctggatcgacactaaaggcttccactgcttcattgccgtcgtaagcgaaatgggcatcccaagcttctttttggaaaaacatactcatcatttctgatacggatttgttatcttctaccattaaaattttcattagaattccttctctttttacgttgctatgtctatattatacagtagataaaccaattacggatgaataatatatgaagaagtgatgaaaatcaaacgcatcacggttcccgtttgcatggtatcgctaagcatgatagcatgttaagcagatatcattatttaggaggccccattttgacttataaaggactagtatttttcgatcttgacggtacactttacaacgaacattctgaagtagatgcagctgttgcgattgcactccgccaattacgcgccaacaactacttaccaatcattgcgaccggtcgctcaccgcttgaaattcaagatgcacttgcaaaaaccggcatcgattcattcatttgtttaaatgggagcttcattcaatatgaaggtcaacctgtttataaaggcactattccaacgcccgtgattgaaaaaaccgtcgcaattgctaatgctgctgacgaagccatcgctttttataatgaagaagcaatccggattacggctgtaactcaacccggcaaagatgcctacaagtttgtcaacgcccccgtccccgaagttgatccagactattacttgaatcattcagtctacatgatgttgattctcacaaacgacaatgacaaggcctatacagaaacactaagtaccgacttaacattctaccgcaacacaccgaactcaattgatacggttgaaaaagattgttcaaaacaaaccggtattaaagaattgattcgctcacaaaacttaatgggcatcccaacttatgcgtttggcgatggtacaaacgacttaccaatgctcgacttcgtagactatcccaccgttatgggcaatggtattccggaagctaaagccaaggctaaatacattacttctaagaatactgaaggtggcattattgagggtttacgccactggggcttaatttaatcacttaactaatccgcgccataacggctcaatcactgtcatggcgctttttttatcttgacgcttctcagtagaccgattaaaattagaatcatctcacttaaaaaggagttactaatgacacaacattcactctttgccaaaaaacaaatcgacgtgaaccaatttaaaaatagtacactagaacgccatttaaccgcctttggtttaaccgccatgggggttggtgcagtcgtcggcgccggtatttttatcacaccagggattatcgccgctaaatatgctggacccggtgcgatgctgtcttacctgctcgctgcagtcgtctgcgcaatggctgccctttgttattcagaattcgcttctacaattcccttggccggtagtgcctacacatacgtctacaccgtcttcggtgaattaatcgcgtggattctaggttgggcacttatttccgaatatctcttcgcagtcgcctcagtggccgtcagttggtcagcctacttccaaaatctaattgctggctttggattacacttacctaccttcttatcgactgcatggacgcctggccaccctggtggtattaatttaattgccggtttaattacgttattgattgggttcttactatcaaatggcttacgcgaatcaacacggattaatacgattatggttggtgtgaaagtcgctgtcatcgtaattttccttggcgttgccattttctatgtgaaaccagccaacttcaaaccgttcttaccatttggtgctggtggcattctttctggggcagcattagcattttacgcctacatcggctttgatgccgtttcaaccgcatcagaagaagttgtcaatccgcaacgtgatatgccaatcgggattatcgcttcattattgattgcttcattattgtatgccgcagttgccaccgtcctcgttggcgtcgtgcactatacaaaactcaacgttggtgaccccgttgcttttgcgcttcaattgatgcatcaaaactgggttgctgggattgttgccctgggagcagttgccggtatgacaactgtcctactcgttatgacctacggcggaacacgtctgatcttcgccattagtcgcgatgggctattgccacccgtttttgccaaagtcagttcaaaaacacatgtgccagttgcgaatacatggattttcgccatcgtcacaagcatcgtcgcaatggtagtgccacttgataagattgctgaattggtcaacattggcacgttattcgcctttgcaactgtttctctcggtgtgatcttcctgcgcaagttaccattttataatgaattgccacaagggtttaaagtgccactattcccatggattcctttactttcatgcggcttatgcttactactcatgacccagttacaactaacaacttggattgtcttcttaatctggttggtgattggcctaacaatttacttcagttacggctaccgtcacagtcgccaataaaaaataggcgttaagcagttttcataatctgcttaacgcctatttctatgcaatctatcgtgaactatctacaaaaatgcatgaacatccgtgaaaatgaggtcatgttgccagcaagaatcgcgacaattggcactaatgcccacaaccagtacttattattcttccgctgttcaacctcagctttcaaccgtaaattctcattttccatcttaaggcgtgcaatttcaagttctaatttatctttgtcatccatgcaactcaccttccgtcctaatttattaccgccattataacagaatttttcaaaaatctcccacctatccactccaacaaaaaaagcccctctaatcttgtggattagaggggctttaacgtgcttttcaaaccatacttctgcggctagctacgtcccgcaaacgatcgactccgtcgctcattcacgaaactaggctagtcctcaaagtataaccggcttgaacgcacttctatttttaacgtgcttttcaaaccatacttctgcggctagctacgtcccgcaaacgatcgacttcgtcgctcattcacgaaactaggctagtcctcaaagtataaccggcttgaacgcacttctatttttaacgtgctttcaaaagcatcctattccggttagctacacaagtcaaacgattgcttacagcaatcattcgccctgttaggctaatcctcacaggataaccacttttgacgcacttctattttttgtgtttcttgttcagaatcttgtcgaataagttgttgtcttgtggattaactgagtcaccacttgcgactgcaaatgcttttagcgcatcacgttgtttactgttgagggtctttggtgtcacgatgttaactgtaacgttttgatccccattacctgtcccgtggagcttaggcgcacccttaccacgtagacggaagacggtattcgtttgagtccccgctggcacttttagtttaacaggaccatggactgtgttgacttcaatttcatcccctagagcagcttggacaaagctaattgggacttctgaataaatttgtgcgccatcgcgcttgaattcagcacttggtgccacgcggaagacgatgaataaatcgccataagggccaccgtttgtgccggcttcaccttggccttgaagacgcatttgttgaccatcttcaacacctgctggcactttaaccttaacagtatgccgttcatcttcgtgacctgttccatgacatgtttcacacttgtctttaatttctttaccagtcccgccacagacatcacagacttcttgagccatcatgcggccgaaagctgtttgtcgttcaacttggacttgacctgcaccgtgacatttgtgacacgtttgggcgcttgttcctggtttagcaccagagccatgacacgtgtgacattctgattcacggttataagaaatcttggtttctttgccgaaaatggcttcatcgaacttcaaatccatccgatattgtaaatctgaaccttgacgaggagcgtttggttgttgccgagcaccgccgccaccgaagaatgaactaaagatatcttcgaaaccgccgaagccttcagcaccaccaaagccgccaccgaagccttggcctgcgccgccgccgaaaccaccgttcataccagcatgaccgtattggtcataagctgcccgtttttgtgggtcacttaatgcttcatacgcttctgtgacttccttgaacttggcttctgcatctggggctttgttaatatctggatggtacttctttgaaagtttacgataggcctttttaatctcatcatctgaggcgtctttacttatccctaagacgtcatagtaatctcttttatcagccattgtgggcctccattcatatacttacgcgttaaatctatcctatcaaggatagcataattgactgattaaaaaaagccaaggccctagaccatactaggttttggctttttttaaaacgcattattatttgtcgtctttaacttcttcgaagtcgccgtcaacagtaccatcgtcagacttaccgtcagttgcattaccttcagcaccagcagcttgttgtgcttcttgtgcttgttgatataacttaactgttaattcttgaacgatttcactcaacgcatcgcgttttgtcttcatgtcttcaaggttgttttcttgttgtgctttgactaattcttctttagcatctttagccttttgtaattcttcgtcagaaactttaccttcaagttctttcaaagtcttatctgtttggaagattaattgatcaacatcgttcttcaaatcaacttcttctttacgtttgttgtcggcttcttcattttcttgagcttctttcatcatgcgatcgatttcttcgtctgataaaccagagttactcttgatagtgattttttgttctttatttgtgccaaggtctttagcagaaacattaacaatcccgttcttatcaatatcgaatttaacttcgatttgtggcacaccacgaggtgcagcaggaatatctgttaattggaaacgacctaaagtcttgttatcagcagccattggacgttcaccttgtaagacatggatgtctacggcaggttggttgtcggcagctgttgagaatgtttgggctttgcttgtaggaattgttgtgttccggtcgattaacttcgtgaagacaccgcccattgtttcaatccctaatgataatggtgtcacatcaagtaaaacaacgtctttaacgtcacctgagataacgccaccttgaacagcagcaccaagagcaacagcttcgtcagggttgattgagtgatcaggttccttgcctgtccagttcttaacagcttcttgaacagcaggaattcgtgttgaaccaccgtttaagatgaccttgtcaatgtcgcctgattctagaccagcatctttcaaagcattcataacaggtgcttttgtccgatcaactaagtctgatgttaacttatcgaattcagcacgtgataaagtcatttccaaatgtaaaggaccgttttcgccggctgagataaatggcaagctgatttgggtgcttgtcacaccagataaatcttttttagctttttcagcagcatcttttagacgttgcatagccatcttgtcttttgacaagtcaataccgttgtctgatttgaagttttcaactaaccagttcatgatggcttcatcaaagtcatccccacctaaatgtgtatcaccgtttgttgataatacttggaagacaccgtcgcctaattcaagaacagaaacgtcgaaagtcccaccaccaaggtcataaactaagactttttcgtctgtttctgtcttgtccaaaccgtaagctaatgctgaagctgttggttcgttgataatccgtttaacatctaagccggcaatcttaccagcatctttagtggcttggcgttgtgaatcattgaagtaagcaggtactgtgataacagcttctgtgacttcttcaccaagataatcttcagcgaatttcttgatgtattgtaagatcattgctgaaacttcttgtggtgtatatgatttatcgccaacagttactttgtaacctgcttcgccgatgtgacgtttgattgatgcgattgtatcagggttagtgattgcttggcgttttgccacttcaccaacttggatttcgccgtttttaaatgacacaacagatggtgttgtccgtgcgccttctggatttgtgataatttttggttgtccgccttctaatacggcaacagctgagttggttgtccctaagtcaataccgattactttactcataaaaaataccctctttttttagatttttagtttaatttattgtgcaacaacgaccattgctggtcttaagacgcggtccttcaagtagtagcctttttggaagacttgtacaacagtatccgctttttgatcaccatcaacagcgaccgtttgcacggcctgatgaatggtcggatcaaaggcttgtccttgcgcctcaatttccttaacgccatgatcttctaaagcatgtttcatatgatcgtatgtcatttgaacaccctttttaagactctcagcactatcatcagttgcttcagttgccaacgcacgttctaaattatccaaaacgggtaagacatcttttgcaagtgattgcccatcatattttaacaagctagcttgttctttttgatgacgggtttgaatgtttttaatttcagcttgtgaccgtaagaaactatcttctaaatcatcatatttcttttggagttcagcaagttgagccgctaaatctggcttagctgcatcttcgtcaggtgcagcatcttcgatcacttcatctgcttctaattcaggttcaaatggcgtttcttctttaggtgtttctgtttctggcatttctgctactggcttttcttgtttctcagccttttcttgcttggtcaaacaaacacgctccttttaagattgatcatcatcgaaattcgcataataatcaattaatttcttcgctaactcttcacggaataaatcgagtaacccaatcatccgtgaatagggcatgctagtggggcccagtagtgcaatgactccctgtccgtgttcaccaacgtcataattaacagtcattagactataatgtttcaacagatcgttggccatctcggtgcccaggcgaacctgaacttggctattggcgcctccaggggacaaatctagcaacttggctaaatcatctgaacgattaatcatgttatacaacgacttcagctgggtgacatcggagaactctgaaaaattcaacaagttcatctgaccgccaacaaataagcgctcttgactcgcctttttcaaaacatcgtcgaagatgtctaaaaagccggtcggagaagccatgtactgggctaatagcgccggtacatccgtctttaacttctgactaaccacggttaacggtaagccaattaggtgatcattaatgattcgaatggctttttcgagttcatcacccgaaatcgcttgtggaatggtaaatacctgattatcaactgtccctgcactcgtcacgataatcgccatcacttggtgattactcaacggtactagacgaaaaccagttaaccgaatctcagccacttccggtcctaacgcgattgctgtatagctcgttaggttcgataagatattagccgattgtgagacgatttcatcaatcttatgatagtgctgtccaaatgattgttggaccgttgccacatcaaccggattgagggttgctggttgcatgagatggtctagatagtagcgatagccttgcatcgacggtacccgtccagatgacgaatgcgtcttctcaattaaaccgacactttccaaatcagccatatcattacgaattgttgcagaactaacgtgtaccggcaattctgccattaacttcttagaacccactggctgaccactctctgtaaaaagacgaataatttctttcaaaatcattaattgcctttcggtcagcatgtcatcacctctttttagcacttgaatatcatgagtgctaattacaattattaatatagcaagaacgtcaaataaagtcaagaaacgtaccggcttttttacggatttactgaaaatcggtccttagacggagggccttactggaccaaaggacaaaataaaaaacgagccgcttcttagatggaagagactcgctttatgaagtggaatatttataacgtgcttttcaaaccatattcctgtgcctagcgacacaaggcgaatgctcagaatatcccccggtttgaacgcactcaataactatctagcagaaactcttggaagacttcattgcctaagaacttacctgattcagttagtcttaaccaatcgccttcttgtttgaggtagccctttgcaatttgggtggcaactgtttcgccgtaaacattttgtaatggataattgaatttatcttgaaaatgactgatggatacgccttgcatcgtccgtaacccgaggaagagttcttcctccatttgttcggtcagtggcagaacatggcgttcaatgactggcaccttattttcttttaagggttctaggtattgttggattgggccgaagttatggtaacgatccttacctaaatagccgtaagcaccggcaccaaagccaaaatacttttcattgcgccagtaagttagattatgcgcagattgaaagcctggcttggcaaaattactgatttcatattgatctaagccagcccgcttgaaactatcaatcgcggcttgatacatatgtgcttcaacatcttgcgatggtaaatgcaacttgccttggcgcatcaagttatagaagattgttttgcgttcgagaatcaatgagtacgtcgaataatgcggtaagtcgagttcaattgccttattcaaactatccatgaaatccgcttcactttgttgtggtaagcggaaaatcaaatcgatactcatattttcgaagccgaccttgcgcgcgttatcgattgcccgataaacatccgcacttcggtgaatccgcccgatctgttttaaaatctgatcattaaacgactgcacgccaatacttaaccggttgacgccgttgtccttcagaacttgcaatttttcagtatcttgtaagtcattaggattggcttcaaacgtaaactcaccaccctcataaggtaagtattgatgaatcccatcgattaaacgttggagttgtgctggtgataaagtagttggtgtccccccaccgacatagatcgtatcaattggttcgtctgggtattctgccatcactaattgaaactcgcgaatcaacatatcgacataatcatcgaccggttgaccttcaatgaaaaccttattgaaatcgcagtagtaacaaatatgctcgcaaaatgggatgtgaatataagcgcctgccattaatgttgtgcctctaatttctcaaaataagttcgggtatcggcttcgtcttggtggagttggtcaatcaaggcttccgcggagtcaaacttcacttcgtcgcgcaagtagtgataccaatccactttcacttgttcaccgtaaatatcgccattgaaatctaataagttaatctccaccgttaccgggttattgctgtggaacgtcacattccgaccaattgaagccatgccaatataccattgaccgcgcactaaaaagcggaccgcataaatcccaattcctggtaatcgttctggtcgttgcgattcgatgttagcagttggaaaccctaattctcgcccgcgtgcttcaccatgcactacttcaccggtcgtttggtaaacataaccgagtaattcattagcttccgcaatcttaccagcatctaaatcctctcgtactaatgtcgagccgattttgacaccattatggtcatgttctgcaactgtcacaatggcaaagcgccctttggcatagtctgacaatgtcgtcatattcgcaatctcttttttaccataagtgtaatcaaagccagccaccactgtatccgcatgtaaagcgactaagtattgatcgacaaatgtttgtggggctagttgtgcaaatgcttcattaaagtgcacgatgtagaaaacatcaacgcctaactccgccatcaattcttgcttgcgctcaaccgttgataaataacggaatgactcccgatcggcattgcgataaacaatggcaggatggatatcaaacgtcatcacagctaatggtaaacctttttgaactgcaatttgttttgctttccgaattacagcttgatgacctcgatgtacgccatcaaaaaagccaagcgccaagaccacttggtcagctggcacttgttcttttgaatatggatgaattaattcaatgacacgcatatttttcacctagttttttttaatgagtcccttgattttgtaaatacattttataagggcgataaagatgttgcgctgctttttcaacttgatagagcgccttgatatgcccttgataggtcaacgccacaatctcatcggtttgttctggcaatgtcaagaacacaccgtttaaaagcttggcccattgatcgtcgtctaaagcaatcttcttgtaatcttcaaatacatggtcaattggcaataaaacgtctgccagttcgcccgcttcagctttttgcgccaattgttccaacgtgatacagttaccaatttgaatgccgccactcttaagacgtgtcaaatctgacatcactgcgggtaaaccaagtttacgaccgaaatcaacagctaatgtgcggatataagtcccctttgagcaaccgacaatgaaccggaatgtttggcgcccagattctgcgtcaaattgtggttcaccatccaaatcaaactgcgtaatcgtgattgaacgttgtggccgttcgactggatcaccagcgcgcgcatagtcgtataaacgccgcccattgactttcaccgctgaaaacatggggggaatctgaattgaatcgcccagaaaactagcgagggtctctttgattttctcagttgaaaaaggttctgttaagcgcgcctcttcaacgacttcaccatctaagtcttcagtcgttgttgataagccaagggtgatttcacccgtgtagactttaccagaatgcaccaattgatcaacaaccttcgttgcttgaccgatacagattggtaacaccccatcgacgttgggatccaacgtgccagaatggcccactttcttcatgtgtaaaatgcggcgcactttaaacacacaatcgttactcgtcatgccgcgttctttatataagggtacaatgccgtccataagtaatctcctttaagtattaactaaactattatagcatagagtgtgaagtcgaacgggattagctttatgatgctgctcaatttattatcaaagcacaaaaaaagatgggacaaaagaaactcttgcccatcctcgctcaatgttgttttatagcgttggcctttttgacgtgttttatttcttggaatattaaaaaaataatgatttataatgggaattaaaatacgaatttagacgactttttcattggtttggtatagcgggaagaatgctttttattatttgtataatacgtgttgtatgcttatcggtctaattgtttatcgcagtaatatggattttgtgtgtcgataatatttatggaaaccattatcgttttattatagtcggagttggtgaagcgtgttaagttaaatgtgttccaaaaataattttttaggagatgagactatcaaaaaagtagtaggtattttagcgttcggcattttaacgaccagttgcatgagtgttttacaagaagcaagggctacgaccagttctaattaccaaagtaagcaaagtgaggtgcttgatgatagcctccaacctaaggtgaggcaccagaagggtgtaacacgttcagaaaaggcgccatattcaaaactgtatattggccgcggtgatgttaataaagaattggctcggcaacaaagggccttgagttattcaagcttagagccttccggattatacgccaaaaaaggggacgtgctgacggtgagcaaaacgggtcaagacttgatgtcgctgacgattggctcgcctgagcgagatgttcagaaacgatatccgctcgtaaatggggtgacgactattacagttgaaaatgatggccctatttatgtgacgaatccaaatgattcaggcggtactagggtgtcaatctttgatgccactggtgaaatgccgttctttgatgcaaacaagacgagtgtcgaagattttaagaaacaaatgactgaaatgacagacgcaaaagatgttcaacttgttagtgatcgtgctttaattactgtgagttatgagatggaaaagaaatatttgggggatcccaaagcgttaatggctaattatgaccgattcctggtcgctcaagatcgagtttcagggatcagtaatgaaggtcggccggttaacttttcagatcgccatttacaacatttcttagaatcgccatcgtattatatgtatgcgacaaacgaatacatgggttttaaaggcgatgcagctatgaaaagtttattagaacttcaggatccttgggaatctggcatggaagtggtcatcagagacaacaaaaaccatggacatggagagaagttgtcgaatcgagtgttaatatttattcgttagcagcgcaaaaagaaatgacgggtgcgatgcctgatttagataagtattatccagaaatgcacgcctatctaaattctgatcataaaaacttcaatcaacaaggggactttgtcaaaatgacaatgtttgcccaactagcaaacacctttggcgatgatttctacccgatcttacatcagtattatcgcgaaaatcagttagcctatgattcaaatgaagatcgaatgcagcattttttgttacatgtctctgaagtaacgggctataatatgctcccttattatgaacaatggggatttaaagtttctgaagaagtacagaagaaaatcagcaactacacaacgttgtctgacccaatttggttaaatgacaatcaaactaaaaaacaattgccaatgagcttaatgaaggctgtgtcgctcagtaaacaagggattaaagttgacttaacaaactatcaaattaatatctttaaggatcagaaattaattgttaagaaaaatggcaaggtgatcgcggagttggctgataagaaaccagctaatgggacagttattaatgatatttggcagattgatgaaccacttgatgtaaccgatatgattatcattgaacaacaaaatgccaatgggacttataatcggtttaatcaatcgatcagtgggacttcgcttagggaacaattggaaaactatttaaacacaacaaaaccaatcgagacgattctaacgcaagataaattaaacaatctacgccaacaggttgatgcactacaacctaatactgataaagaagaattaatggagatggttaaaaagctccaacaaagatatttagacgtattagttggtgaaattgaactgaattcagaatcagaacttgtggtgacatttgctgatggaaaacttaaggaatatgacgatttaaaagttcaagcagatacacatacgattgctcaagtaacgaatggtaagccgaatgttggtcgtgttgaaggaaatcaattgattattccaaaccaaaaagatgccactgcgatctcgatagcggtgactttaccgcatggtacttatctagtgaaagtgattagtcaagaggtgcttgttgctagaaagttagtatcggatttatttgaacaggacggtaagttgaaaccaaatgtgacgcaaaaagtgttagatcgagcatggcagcaagtaaatcagttaccacaagacagcaaagaagcgctagcgaaaaaaatgaaggaggcacaacagttattcttgaatgcgcttattgcggatgtaacgcttaaagatgccaaaatgatggtgacttttgcaaatgacctatttaaaaaatatacgattcttgtcatggaagaagaccacagcatagggacaatagtgtttggccaggcctttgagggagaattaagcggcaatgtctttacaccaatgcgtttaacagtttcgggtaaaacgtatcgggtaaacgttatgcacaatagcggtacctatcaagttaaaacgttggtagctgattgatgggttatagcgaaaccagataaactaatctaaaggcttttttatgaaattaaattgaaatacaaaattgatatccatcaataaaggctgagcaatagtgctcgcctttttatttggtttcaacatttgataatccccatttccgtggtagtctgtatataaagcattatcagatggaggttaggcaaacgtgggaaatggacgacttagacgtgctagtcagtttaataagacacggtttcgctttgtgggcaaagggttattagttggggcgttcactggattggtggtcagtttatttcgcttagcgattgaaaaaggactggcctttgttatcactatctatcaagggttaaatgcacacccgtggtattgggtgccattggttggtgccaatttattgatcggcctgcttgtggcacaattattaaaaaaggaaccgaatataagtggttcggggattccacaagttgaaggacaattggaaggtgagtttgatttcaattggtggtcaatcctgtggcgtaaatttgttgggggcattttaagtattgcacctggcttattcttgggacgagaaggcccatcgattcagctgggggctgccgttggacagggggtcgccgctaagttggtaaatcgcggtgctgatcgtcggattttaatcgctagtggggctgccgcgggcttatcggctgcgtttaatgcaccaattgccgggacctttttcgtactagaagaaatctaccataacttttcaccgttagtttgggtgacgtcgcttgctagcgcaattgcagcgaacttcatttcattaaatttttttggtttgacaccgacattacatattacgtactcccaaagtttgccaattaatcagtattggcatttgttgatacttggtgtcgtattaggactgttgggatacgtttatcagaaggtattattgtggttaccacaactttatgcgaagctcccgctgccaaaagcgtataccggattagtgccattattatgtgttttgccgattggttatttctggcccgaaattttgggtggtggcaatggattgattgcacaccttggacaaaatttaccgacaaccagtgtggtggccggtctattcctattacggtttgttttttcaatgatttcatacggttcaggattacctggtgggatttttctaccgattttatcactaggagctttaatcggtgccctttatggactcataatggttcaacttggttggttagcaccagtttatgttcccaacttaattatttttgcgatgggtggttactttgccggaatcgggaaggcgccatttacggccattctactagtgaccgagatggtaggttcgctcgtgcacttgatgccattagcaattttatcgttggtggcctacatcgtcgttgacttaatggggggcgcgccaatttacgcatcattattgcaacgcgcacttggcaaaccatatcgtaagttagcaacattctctgatcgcttggaggtaccagtgtttgcgggcgcaccgttagaggatcgccaagtccgtgaagtggactggccaaagacatgtttgttaatcgcgattgttcgtggcgaatccgaactgattccgcatggtgatacgttgattcgtgctggtgacacgttgattgtgttaacggatcatcagctacgggcgacggtgcggcggcaaattgaagacgctgcccaagccttgcgaaatacggatgagaatctcgtgaaataatcgataaaaaagtggtgattaactactttttatgctaaagtattaaaagacagtgtagatagaaaggtagggaattaggttggaaaatcttatcctgaacttattattaatcgattcaatcttgattgtgatcgcagtcatgatgcaaccaagtaaacaacaggatgctttgagtgcgttatcaggtggttctggtgatttatttggcaagcaaaaggcccgtggtttcgaagctttcatgcagaaagtaaccgttgttttaggggctttattcttcgtctttgcattagctttagtgtacttatcatcacactaatacatgtgagacgggtcgaattctaataagaacgttgatgcggtctcctgttgaatggcaggagacctttttaaatgaattcaagcagtaaggactttgggggtgagcgcatgtcttatcggttgccgcaaccgttttattttgacggtggttcagtcggggttgtgttgttacatgcttatacaggtagtgcgaatgatgtccgtatgatgggccgctttttggagaaaaatcagctggcggttagtgcaccacagtttgcagggcatgcaacggctgatccaaccgagattttaacgcgcggttctgtcgatgcatggtgggccgatacggtggctgcgattgagcagttatccgcggctaacaaacaactgttatttgttttcggattgtcattaggcggattgtttgccatgcgggcattagaagaactaccacaagtttgtggtggtgggatttttagtgcgccagtactcgaaggaccgactgctaaattgacgccgctctttggccaatatgctaatcgaatcatgcagttaatgggcgtcccggctgcgcaacagacagcacgtttggcgactattaatcagcaattaccacaacaacttgcatcaattggcattttcagtcgacaagttgtggctgacttgaagcaaatcggagataaaccggtcttcatcggtcaaggcggacaagatcaagttattgatccaacacaagcccaattcttacaccagcaattaacgcaacaaaacataacagttgattatcattggtatccacaagccggccacgtcattacggtcgatagtgcgcatcaccaattagaaacagatgtcctagaatttataaaccgttttaagaaatgagaaagaggtgttgatgtgacacaagttgaacagatgaaagcagcgattcttgcaatttttgaagcagatgcaacgcaacaattaaacgtatccgaaattagtgaacgaatcggcgttgccggttcacaagggttcaaagacctagtgaaagtattagcagaattagaaggagataagacattgaatatggacgatgccggtaagttcagattaccagctagcaaccgccttgttgaaggggtcttccatgctaacgatcgtggctttggcttcgtttcaatcgttgataaggaacctaatgatccagatatctttatcgccccacccaatacgaattttgcgatgaatggtgacacggttgaagtggccatcattaaagaagccgaagaaaacagccgccgcggtcctgaaggaaaagtggcgaaagtgattacgcgggggattgaagaaatcgtcggcgaatttatgccttattcagatatccaaaaagaaaaaacaggctggattggatacatccaaagtcatgccaaaaaattaagtaattaccgaatttatttaacggataatgggttacatccacaaaagggtgacatggtccaagttgacgttaccggttacccaagtgttgaggcgccaggtcaaatgctggggattgccaaacaagtacttggtaacaagaatgatcccggcgttgacgttttatcaatcgtgtatcaacatgatattaagacggacttcccagaagaagttcggcttcaatcagaagcgattccagatacggttttagaatctgataaactaggtcgtaaagatttaacggatcaagacgttgtgacaattgacggcgacgattctaaagattttgatgatgcagttaacgttaaaaagttggcaaacggcaactactacttaggggtccacattgctgatgtgagttactacgtcactgaaggttcaccattagacgttgaagccttagaacgtgggactagtacttatttaactgatcgcgtgattccaatgttgccattccgcttatcaaacgggatttgctcattaaatccagacgttgaacgcctcgctttaacgtgtgaaatggaaatcaatgaacacggcgtggtaatggatcacaagattttcccaagtgtgattaagtcaacagcgcggatgacatacaaaaacgtcaataagatcttaacagatcaagatgctgacttacgggcgcaatacgaacggctcgtgccaatgtttgaaacgatgtcagaattacatgaaattctcttgaagaagcgtcataaccgtggtgcaattgatttcgaagaagacgaagctaagattatcgttgatgaaaatggcaaggccatcgacatcgaattacgccaacgcggtctttcagaacgcatgattgaatcatttatgttggctgctaatgaaacggttgcagaacattacagtactgctaatgcacctttcttataccggattcatgaaacaccagatgctgataagatgaagaatttctttgaatttatcacggcttatgggattcaagcacacggttcaagtaagaaagtgacgccaatgatgctccaagaagtcttgacgcaaattgaaggtcaacctgaacaaccgattattacaacgatgttattaagaagtatgcaacaagcacattattctgatgaatcccttggtcactttggtttgggtgcggaattctacacgcatttcacgtctccaatccgtcgttaccctgatttgatggttcatcgtttgattcatagttatgccacaaatgggatgacgattgaagaaaaagaaaaatgggcacctaagttacaaccaatcgcagaacaaacatcccttgaagaacgtcgctcaatcgatactgaacgggaagtcgttgatcttaagaaggctgaatacatgcttgataaggtcggtaatgaatacgacgctgtgattagttctgttaccagctttgggatgtttatcgcattaccaagcacggttgaaggcctcgtccacatctcacagatgaaagatgactactatagctttgttgaaagccaattagcccttgtcggtgaaagaacgcataagatgttccgcattggccaaccagtacgggtcaaggtcgcgaatgttgatttagatgcccactcagtggactttgaattattagccggtgaagaagtgccattggcttcggctgaaatcttaagcaagattgaagcacgaccaaaacgtccagcacgcccacgtgatcatgaaaaaggcggtcaacgtcgtggtgatcaaaagaaaaacaatcatccaagacgcccagctgcgaacaaggactcacaaaaacgtacttttaaaaagtaggtgattgaatggcaaagaaacatcctcaaaaaccagcaaatttaattgcacagaataaaaaagctggtcacgattataatattttggaaacattcgaagcaggcttagtgctcactggtaccgagattaaatcggtccgtaagggcaaaatcaacttacgtgatgggttcgcccgcgtccgtaaaggagaagcctatctcgaaaatgtccatatcagcccttatgaacaaggcaatcagtttaatcatgacccattgcgcaaccggaagctattgttgcacaagaaggaaattaccaagattggtgctttaacgaagaataaggggattacgattgtgccgttacgggtttatttgaaacacggctttgccaaagttttaatcggcgttggtgaagggaaacgggaatacgataagcgcgaaacactgaaacgaaaagaacaagatcgtgaaatggcccgcgcagttcggattaaaggttagtcctttaattaaaatctaagtataaagtcaaaaagctatcacaaaatttacttttgtggtagctttttctattggaagtatttggtttgtcggcggttacaagtgggtttttattacacaaaaattataaatgtcttcaaactgtaatataacgtcattaatctgcaatcttcttgcggggattgttgcgtataatcaagtctgagttatgaatggaggagtttaacaagatgcgatttagaaaactagcgttagctgttgttacctgtttagttgcaatggttacgatgggcacatctgttagtgctgccagtttgagcgaattacaagcccaagaaagcagtacccaaaaaagtattgatgatacaaattcgaagattcaagccactttaacgagcgtgaatgcgaagtatcaagaaattaatgccttaaaggaaaagattaaggataacgaaaaaaatatcgaacaagcacaaacgcttttgaaaaagcaacaagccactttagcaaaacgtaaaagctatgctaaggaacgcttgcaatcacttcaacgaacagccgatgaccgcaacgttgtcaacgcactattgtcagctgattctttgagtgatttcttcaaccgggcttacacattgacggttcttcaaagtgctgacaaccataatatggatgaattagcacagagttaccgtgatacacaagccattcaagataagttacaagctagcaagacagaacttgatgaacaacgaagcagtttggatcaacaatctgtcgaactggaacaacaagtggctggcttaaagaataatttaagtcaaagccaagcggatcttgcaaaaattgctaaagaaaaagcagaagaacaagcacgtgaagaagctgaagccaaagcggctgaagcagctaaaaaagcggccgacgaagcaacacaagcgccaattgcaccagttgtggacacaaatgcccagcaagccgatttagcaagcgctgctgatggcaaggccggacaagcgattcaagtgcaagcaacggcttattcaactgccgaacctggtttgagccattttggtgcaactggaattgatttaactaaaaacccaaattgtatcgccgttgatcctagtgtcattccattaggctcacttgttttggtacctggttacgggtatgcaattgctggtgacatgggtagcgcgattaaaggtcacattattgatgttcattttccaactgttgcggcatgtaagagttggggtcgtcgtcatattacaatcacaattattaagtaattttaaatacagccttttttgaggctgtattttttacttcgtggattgttttggtaaaataaataataaattatatttaataaaggttgtcagggcaactcataatgaacgttgttgatgattattagtgaaagttagttgaaatatataatttaatactatagactatttatattgctttaaatcgaagtacggttaagattagctgactaagtattatttagatcggctatcttagaacacggaagaattgaagtactgaatagtgtgagtatgaaacttatcgatggttaactattgatactgaaagtttcagcatgtaggaggaatagaaatggatacgagtaataacaccgatttactcggtagcacatcagcagattttatggaattcgcaggtttataccggtggttgattaacaaccttagcgaatcaatgagtcgtgaaagccaaaaatacggtttatctttcgaccaatttttagtgatgcacgagattcaaaatgcgaataatgaaacaactaacagtgcattggcagataagatgcaagtgagtcgttcagcgatttcacgtcaatgtcgttcattacgtaagatggcttttatcgcagaacaatctgatgaaaatgaccaacgcattcgtcgtgttcatttgacggaaaagggtttggaagtttatcgtcatctcttgttctattacgtagacttgtacaaagatttacaaaatgaaatcggccaagatactgttggcgcaacaatcgaccaaagcaaaaaaatctttggtcgcatggcatcaatgaacatggatcgcccagaagcaaaataaacgttaaaaaaggccgcaaccatttgttgcggcttttttttgtgcgattagcaacggtcgcgcataatgacgcgcgtcactttctttgttagaatagagctagtcactttacgaatgtaggaggaacaacatgggttctcaaaaaaaattattattagtcgacggcaatagtgttgcatttcgtgctttttttgcaatgcaccaagctttagaccatttcaccaatcaggcaggactgcacactaatgcgatttatgctttcaagaatatgttggatattattctgaaaaagattgaaccaacacacgtgttagttgcttttgatgcgggcaaaaccacttttagaaccgaacaatttgccgactacaaagggggccgttcaaaaacgccacctgaattaacggaacaatttccttatatcagagaactcttaacagcatatggtattcagtcttatgaactcgctaatttcgaagcggacgatatcattggtacacttgctaaacaagcagaagctgatggtttcacggtcgatatcgtcactggtgatcgcgatttaactcaattgacgactagtcagacaaccgttaacatcactgttaaaggggtcaatgaaattgaagcgtatacccctgaacacgttcaagaaaaactcggtttagaaccaagccaaattatcgatttaaaaggattgatgggcgatacctctgataattatcccggggtgacaaaggtcggggaaaagactgcgcttaaattgattacggaatttggaaacattgaaggtgtctatgaacatgtcgatgaaatgaaaaagagtaaattgaaagaacatttgattgaagatcgcgacctagctttcacgagtaagacactggcaaccattaaacgtgacgcgccaattacgattggcttagacgatgtggtgtacaacggacctgatatggcagctttggttgctttttaccaagaaatgaacttcaagtcgtttctaaatcaattagatgttgcaccagttgaacccacggctactgaagactatcaatttacagtattaacccttgataacatcgccgatgtcgtgacaaccactgaaaacgttgcgtttggcatcgaaatgttaaccgacaattaccatacagcggacttgattggcttttacattggccgaccagaccactggtatgtcagcgacgacgtaacactcttgacagaatcggttttaaaaacgtggttagaagatgctaaacgtccgaaagcagtttttgacgtgaaacgcaatcaggttgcggtgaatcgcttagggattcacttagcgggggttcaatttgacttactattagcgtcttatttgttgaatacaacgaataacagtaatgatcttggaacggttgcaaatttacatcagtatcaaaatgtccaaacagatgaagctgtttatggcaagggggctaaacgcgcagttcctgtcgatccaaccgtgctttatcaacatctgattcaaaaagcagcagctatttacaaattagcaccacaattgacagaacaattaaaaaaacatcaacaattcgatttattcacggatatggaattgccattagcgctagttttagcggatatggaaatcaccgggattcgagttgatgcaagtcgcctacaacaaatggggggcgagttcagtcaaacgctgaagattttggaagaaaagatttatgcggaagctggcgaaacgtttaacatcaattcgcctaagcaactgggcgtcattctattcgaaaagatggggttaccagtgattaagaagaccaagaccggctattcaacggcggtggatgtcttggaacaacttaaaaaagacgcaccaattgtccaaaccatcttggattatcgccaaatcgctaagattcagtcaacgtatgtcgaaggattattgaagtcaattcatcaagataataaggtgcatacgcgttacttgcaaaccttaacgcagactggtcgcttgtcatcggttgatcccaacttacaaaatattccagtccgtctagcggaaggccgtaagattcgccaagcgtttgtcccaagtcaaccgggttggcagatgtttgcttctgattactcccaaattgaattacgagttttagcccacatttcgggggatgccaatatgcaagaggcattcaaggaagaccgcgatatccatgcgaatactgcgatgaagatttttggcttatcgagcgctgatgaagtgacaccagatatgcggcgccaagcgaaagcaactaatttcgggattgtttacgggattagtgactatggcttatcacaaaatattgggatcacaagggctgaagctaaacgctttattgaagcgtattttgaacagtatccaggtgttcatcaattcatgcaagatatcgtgaagaaggcgcgcgaagaaggctacgttgaaacgctcttccatcggcgtcgctatttaccagatattcacgctaaaaacttcaatttgcgctcatttgcagaacgcacggcaatgaataccccaattcaagggagtgccgctgatattattaagatggcaatgatcttgatgcaagcggaactgaagaaggcaggattacaagccaagatgcttttacaagtacatgatgaattgatttttgaagcaccagaatcagaaataccaatgttagaaaaattagtaccaagtgtcatggattctgcggtttcattagcggtgccgctgaaagttgaaagtggctttggaccaacttggtacgatattaagaaataaggggacacacaatgccagaattaccagaagttgaaaatgtgcgccgcggattggaacaattagtggtcggtaagacggttcaagcaattgagattcgctggtcgaaaattatcagtaatccagacgatgtttttgttgaaggtcttgttggacgccaaattatcggtgttgatcgacgcggtaagtatttattgattcgtttcgatcaaaacttaactgttgtgagtcatttgcggatggaaggcaaatacgaagttgatgatcaatccgtaccaatgactaagcacacgcatgtgatttggacatttacagatggacaacagttacgttatcttgattcacgtaagtttggccgaatgttattaattgaaacgggtcaagaaaacactgtttctggattgaaggacttaggggttgaaccaaccccaacaacgtttaagaaaaccgccttctatcaggcgttacagaaacataaaaaagcgattaaaccactgttgctggatcaaaaaattgtaacgggtcttgggaatatctatgtggacgaaacgttgtggttgagccagattcacccagaaacaccggcgaatttattgacgaaagctgaaacagatcgtttgcatgatgaaatcatcacagagttagaactggcaaccaataacggtgggacaacagtcaatacgttcttaaacgcggcgggtcacgctggggcctttcaggatatgttgcacgtctatggtaagaaagggcaaccgtgtgatcggtgccagactccgattgagaaaattaaagtagcacagcgtggcacgcatttctgtccgcggtgtcagattaagagagaagcggttcaatgacgtattttctaggtttaacgggtggcattgccagtgggaagtcgactgttgcggcattgtttaaagaacagggaatcccggtgattgatgctgatcaagttgctcatcaggtattagcgactaataaatcggtacaggcacaattgcaagcagcctttggcgaagcagttgtcaaaaatggtcaagttgatcggcctatgttgggccagcaagtcttcggtaacccagaggctttgactcagttaaatgcgattactgggcccgctattttgacagccattaaacaacagatgcaagcagcagatgcaccgctggttgtgttggatgtgccactgttatatgaacaacactacgagcaatattgcgatggtgttgcagttgtctacgttgaacgtaaaacacaattgcaacgtttgatggcgcgtaaccaattgactatagaacaggcaaatgcgcgaattgatagtcaaagtgatttggcgaccaaaaaagcgcgagcggatttcgtgattgataatcaaggcacacctgcaatgttgcggcaacgtgttttggcgttgttacaacagttgtgtcataacaagtaatacaagcggtcgaacagattattctgttcgaccgcttttttgtttggaaaaggcgaaatgccttgagactgatacattttttgtttagcctgcttgcctggcatgttatactactgttatactaattgttttaaaattggattgaatttgaaacgaattaatcaaaagataagaaggtgtcattatgctatgtccacattgtcatcagaatagttcgcgggtaattgatagtcgtcccacggatgaagggcgagtgattcgtcgtcgccgtgagtgtgagaattgtcgtttccggtttacaacgttcgaacgagtggaacaaaccccattgttggtaatcaagaaaaacggaacgcgcgaagaattcaaccgtgataaattattgcgcgggctaattcgtgctgctgaaaaacgccccgttacaatggagcaaatgactgaagtagttgatgaagttgagaataagattcgctcattgggtgaaaacgaagtctcttcacaagccgtcggagaatacgtgatgcgcttgttaccagatattgatcagattgcctacattcgctttgccagtgtttatcgcgaattcaaggatatgaatgtctttatgagtgaattacaagaaatgatgaataaagaaaagacgaagaaatcgaattaaggaagaggggttagccgatgtcagatgcatttgattttttgagtccaaaagacggcttttcagtgacaaaagctaactatttgaccgatttcgatcaaacagtcgtcacttacttatatcaaccattgatgggggctgttgcttacagtctctatcttttgttatggagtcaaaccaagaaagaaacggaacaacattttcaaacacatgcgactttgttaaatctgttgagtgttgatttacctgctttttatgacagccgcagcaaattggaagcacttggtttaatgcggacgtatcaaaaaaatgagggaactggccgcaagttggtgtatgaactgtatgcgccattgcaaccacaagctttttttaacgatgatttgttaagtgtggcattgttcgaagcggtccgcgaaacacggtttgtggaactccgtgactatttcaagctacgaccggtttacgccaaggattatcaagaggtcactaagaatttcttgaccgttttccatgtgcaaaacgatttattgacgaacgtgccaagcagtgtggctgaaactaaggcaatgtatcaacaaaaagcagctagcacaccgcagtttacctcggttgagttgcggacttttgattgggacctattacaagatgcaacggcgcaataccagattgatacggatcaaattctcaaaaatgaacagggcttgtttaatctccattatttctatggtctagatgagatggacttagcgcgtttgattggcttgacgatgaatgttgctgacagtacgattaatatggcagcgctcgaacagaacgtcttgaacaattacacacgacgtcagagtaaccggcaaacgccagctgctacaacaacgcaaaaaccgttagccgagttacaaaaagaatggcaaaaagccggctttaacgaacaggaattgcagtggctaacagaaagtcagggctacttgccagttgattatctcgaatacttgaaacaaaagaaccacggctttgtcgctaaaaatgaaatccgggcgttaaaggacttgcaaaaccgctatatctttaacaatgatgtgctcaatattttggtcgtttatatcattacgcaatatgatgggctcactcaggcgctagtcgatcggattgcgaaccagtgggctcaacaaggggttaagacggcagcggatgcgattttgcagattcgcgatttccaaaccaaacagacggcaaaggtgcaaaacaatcgccaaacgcgttatcagaataaaactaaaaaagaaccagtacctaaatgggctaaaccagattatcaagcgccaaaagaaacaaccacacctgagcatcagcatgaactagaagcggcgttgaaaaaaattcgtgaggggcgggaatcgtaatggaaaatatgggtaaagatttgacggattacatgaatcggcaaaagttaaaccaacagtttaataaattggtcgaagatgccttgaacgattccgatgtccaagcatttatacaagctaacaaagaccgcttatcacaagaaacggtcacgcgtagtgccgctaaaatttacgaatacgtcatcgaaaagaagaagttagctaatgggcaaaccactttggcaccgggttatgcgccaaagttagtcttaaataaccattttatcgatgtcagttatgagcctacggtaagtttattacaagagcgcgaacaagctgccttgcatgcacgagtgaagtcaattaatatgccgcgcgatattgaacaggccaagattgattcatacgatccaaccaatcggtttgacgcattgatcaaagctaccgcgtttatcggggcttatcggcaagcaccccatgattttcaccaagccttgtaccttagcgggcaattcggggttggcaagacttacttgttaggtgcgattgcaaacgaactggcgttatccgggtttgaaaccacgttgattcatttcccgacatttgcagtggagatgaagaatgcaattgggcaaaacaatgtgttagaaaaggtcaacgtgataaaaaaagcaccgattctgatgattgatgatatcggtgctgatgcaatgagtgcgtgggttcgggatgaagtacttggcattattttgcaatatcgaatgcaagaacaactcgccaccttcttcagttcaaacttcacaatgactgaattagagacgcatttgacaactagcaaccaaggagacgaaccggttaaagcggcccgcatcatgcaacgtgtgcgctatttagcgcaagaaattgaagttggtggtcaaaatcgccgcttacaaccttagtaatttaggcttgctaaaaaagcaattaagtgttttaatagaatcaatcaatgatgaaagacaccttttaaatgaaccatcgcagagagaaaaacatagctgaaagtttttcacccccatttaattgaccactttcaaaggcaatacaactgatcgggtcgtttccgttatagacgcttaaagttggagaaccaaatgttggggtctcaatctgggtggaaccgcgaaattaattcgtccctgagctgcacaattcgtgcgtctcagggactttttttattgttgatgacaaattagaaggagtgaatagtaatggcagagattcaattaacttttccagatggtgctcaaaaggcatttgaacaagcaacaagtcttttagatgttgctaaatcaattagtacaagcttagctaaaaaggcaattgccggtaaattgaacggtgaattagttgatttacagcaaccaattttagaagatggggcaattgaaatcatcactaaagacgacaaagcaaccgatttgatggcaatttggaatacggcagcctttgttttagctgcaacgttgaaccgtgcttatcccgagatgcaattcggcgaagtacatgcaactgaagatggcttcttctatgataccgaaaacgaagctggtcaagtagctgtgaccgacttaccagacattaaaaaagcaatgagcaagttaatccaagctggcggggcaatcgaacgtgtcagcttagacaaagctgctgctaaaacactatttgctgggcaaacttacaaattagcattattagatgaaatggaaacagaccaagtcttagtttacaaattaggcgattttgctgattttgggttagcaccaatgctagctaaagtgagcgacgttaaggtctttgaactcttatcggttgccggcgcttattggcaaggtaaatcaagtaataagatgttacaacggatttacggaacagcttacaacaaacaagctgacttagatgctgacttacagcgtcgtcaagaagctaaagaacgtgatcaccgtgtgattgggaaccaattagacttattctttgttgatcctaaggttggtgcgggcttgccttattggttgccaaatggtgctaccatccgacgttcaatcgaacggtacatcattgataaagaagttgccaatggttatgaacatgtttacacaccaattctagcgaacttagatttgtacaaacaatcaggtcactgggatcactaccgtgaggacatgttcccaccaatggatatgggcgatggcgaaatgcttgaattacgcccaatgaactgcccatcacatatccaagtttacaaacaccacccacgttcatatcgtgaattaccaattcggttagctgaactagggatgatgcaccgctatgaaaaatcaggtgcgctttcagggttacaacgggtgcgtgaaatgactttaaatgatggacatacattcgttcgtcctgaccaaattcaagatgaattcaagtcaattttgaaattaatgattgaagtgtactcagacttcaatatcaacgattatacattccgtttgagctaccgcgatcctgctaataccgaaaagtactatgctgatgataaaatgtggaacaaagcacaaacgatgttaaaaggtgctatggatgatcttggtttagattacgttgaagctgaaggcgaagctgctttctacggtcctaagttggatgttcaaacgaagacagctatgggcaatgaagaaacactttcaacaatccaattagacttcatgttgccagaacggtttgaattacaatatgttggcgaagatggcgaaatgcaccgtccagttatgattcaccgtggtttagtatcaacgatggaacgtttcacagcttacttaacagaaatctacaagggcgctttcccaacatggttagcaccaactcaagctgtgattattcccgttaagaatgaattacattatgattatgcaaagaacgtcaaagatgcgatgatcaaacatggtttacgtgtgcgcattgatgatcgtaatgaaaagatgggttataagattcgtgaagcccaaacaagcaagattccttatacattagttgttggggatcaagaagttgctgacgcaacggtttctgtccgtaaatacggtgaagaaaacgctgctgaagaagcttcagacatgtttgtagatgcaatcgttgctgaagttggtaactacagtcgcgatggtaaagatcacaaaacaatcaacctataagcggttattaaaacgtccgaaatgttattttgacatttcggacgtttttttgtttttttaattgcgcacaactaaaaaagcggtataataaatatgtaaacgattccaatcgttgattaatgggaggcgttattatgacgatagaaaaatatcaagcaggttcagcagagcaaccattggacattattaacctctatgacttggaaaaagaagccggcgaagttgttcccaagggtggctttgggtatatttacagtggcgcgggtgatctttataccattaacgaaaatattacggcatttaatcacaaatacatcgcaccacgggttttacaagatatcgaaaatccagatacaactaccgaaatctttggcgatcacttaacatcaccaatcattatggcacctgttgcagctcataagttagtgaatactaaaggggaagcggcaaccgctaaaggtgtggctgattacggttcaatcttaaccatgagttcatttgcgtcagcaagtatcgatgatatggcaaccgcagcagatggcgcaccgcaatggttccaactctatatgagtaaggacaacgatatcaatcgtaagattttagatgaagcgatggcgcataacgttaaagcgattgtcttaacagctgatgccacagttggtggtaaccgcgaaaccgataaacgcaatcattttacattcccagtcgggttaccaatcgttgaagcttaccaaacaggtgtgggccaaacaatggatgccgtctacaaatcagctaaacaacgtttgaaccctaaagatgttgaattcatttctgaatacacacatttaccagtctttgttaaagggattcaaacagcagaagacgttgaaattgcacttcaagccggtgctaaagggatttgggtatccaaccacggtggtcgtcaattagacggtggccctgcagcctttgattcattacacgtcgttgctaaggcagttaataaacgggtaccaatcgtctttgatagtggtgtgcgtcgtggtcaacacgtctttaaagcattggctgaaggggcagacatcgttgcaatcgggcgcccagtcatttacggattagcacttggcggtgcacaaggggtacaaagtgtctttaactacttgcaaaaagaattagaattagtcatgcaattagctggtacacacaacattgacgaagtaaaagccacgcacttagtggacaatcattacggcaactaagtacacgtaaatttaaatgcgggatttccttgactttaaattcctaaccgagtatacttattttcgttgagaaataaagcagaagttcccgcttctcgccttagtagacacttgatgtctctgggctgatagtttctaattcggacgaactaagtaaccgaacaagcgggcctttctgttatgagagggccgctttttttattacttagctgcattttctctctaaactttatggaggtgaagagtcatagcaaaagatttgatggttaacgatggtattcgtgcacgagaattgcgtttgattgctcaagatggcgaacaacttggtattaagagtactcaagatgcaattgcattagctgatcaagctaatatggatgttgttttggtttcaccaaacgcaaaaccacccgttgctcgtattatggactatggtaagtaccgtttcgagcttcaaaagaaacaacgtgacgctcgtaagaagcagaaaaccattaacctcaaagaggttcgtcttagtcccacaattgaacaaaatgattttaatactaagttgaacaatgcacgtaagttccttggcaaaggcgataaagtgaaagcttctattcgtttcaaggggcgcgcaattacgcataaagaaattgggcaacgtgtattggaaagacttgctaaagaaacagaggacatcgctaaagttacagcacgtcctaaaatggatggccgtagcatgttcttaatgttagaaccgctaaaggaccaaaaataaaaaatctgtttctgatttattaggaggaaatatcatgccaaaatttaagacacaccgtgcttcagcaaaacgttttaaacgtacaggtaatggcggcctaaaacgcagccacgcctacacaagtcaccgtttccacggcaagactaagaaacaacgtcgtcaattaagaaaatctggaatggtttcaaatagcgatatgagacgtatccgtcaaatgttatcaggccttaaataagccatagcattttcggattcaagcaaaaattagatcagtacagcaacgctttgacgttgtttgttattcaaggaggaaattcttatgccacgtgttaaaggtggaacagtgacgcgcaaacgtcgtaaaaagattttaaaattagccaagggttatcgcggcgctaaacatttattattcaaatcagcaaatactcaagtaatggtttcataccgttatgcattccgtgatcgtcgtcaacgtaaacgtgacttccgtaagttatggattgctcgtatcaatgctgctgctcgtatgaacaacatctcatacagccaattaatgcacggtttaagagtcgctgaaatcgacatgaaccgtaagatgttagctgacttagctgttaacgatgctgctgcatttacatcagttgttgaagctgctaaagctgcattaaacaaataattaaagatcaaaaaaagagtctgggacaaaacttcgttttgttctagactctttcttttatcattataaaattagtggctaataacaatcttacctggggcatgatgactctcaaggagcttgtggccttcaataatgccttccaaagtaaatgggagcgtcttgaagacggtattgtgtagtaaaccttgatcgatcaattcatttaaatcttgtaaggcggttaaatctgcataatccttacgcggatagacagattggtaattgatgtcagcgcgttgttgatcgtctgttggtaagatggtcgttgaagtgaatgtgccacctggtgcaactaagttattgaggcgttcagttgattctggatcgcgacttaagttgataccgattttagcggtctgcgcaagtcgttcgaagtcagatggctgatcataagcaattacttcttggacaccgaatgagcgcagatagtctaggttagcactattggcaattgcaatcacgtttaaatgagctgctaagcttaattgaacgagtaaactaccaacggcaccactggcacccataatagcgattgtatcgccgtgtttaaagtttgtgaagtgcatcagcgtattgtaagcagtgatgccggcactgggtaaaccggctgcttcagcgatactcatgctggctggcttacggagaatcttcgcagtactagccgttacgtattcgctataagcacccattgatcggtgattgatgacgatttcgccaacgcggtaatcatcgacgtcagcaccaagttcaacgatttcaccaaccacatctgtaccaggaaagattgggaagggtaatgggcgcactgaatcttgtgaaccattccgtagtgcaacatcgtatggattcaatccagcagcgagcactttaatgaggacttggttgtcctttggagttggttgaggctgatcgaaacgttcgaaaacgtcagggccgccaaagtgattaaaaccgaatttttccataacaaacacatcctctcaatttctttaaacgtaccagagttggggctaaaagtcgattagtttgacttatggatttaaatggattaggaattagttggaaattatggaaattaaccgcgtaaaggtgcaatttggtgtcaaataccctataattaatcagtgactagattaaaaagaagtgcgtcagtaggcggttatatttcgaggactagcctagtctggcgaatgaccaacttgttggtcgtttgacggacgtcgctagccgcaaaaatacgcctactgaggcacgttagaaaagaagtgcgttcaaacctggtatactccgagcactagtctaacaaggcgaatgattgctgcaagcaatcgtttgacttgtgtcgctaggcacaggaatatggtttgaaaagcacgttaaagaaaagaagtgcgtcatccacggttagcttccgagcatttgcctaacttagcgagttggcgctgcaagcgccgatttgataagtgtagcaaagcgcaagaagctgttgatgaaagcacattaaagtcgaggggacagtacatgctaaagaatttcaagccaacttggatggtcaatgccatctacgacttaacaccagaacaacttaaggcaaaagggattaaggccgttttaacggatttagataatacgttaattgcgtggaataaccccgatggcacaccacagttaaaagcttggttagcacagatgcaagctgccgaaatcaccgtgatggttgtttcaaataacaaccatgatcgcgtgcaacgcgcgctcagtgaattgcaattaccattcattgctcgggcgaacaagccattggcaactgggattaccaaagcgaagaagcagcttggcctttcgcgacatgaagtggtgatggtcggcgatcaattgattaccgatatgcatgccggtaatgtggctggcgtccggacgatattggtcaaacccattattgacagtgatgcctggaatacatcgattaatcgattctttgaaaaatatattatgcaacaactactaaaaaaacacgcagatttaacttggcgggaggatttaaatgactgaaacacaacaaactgaggaagaactattttgtattggctgtggcgctcgcatccaaacaacggacaaagaagcactcggctatacgcctaattcagcgcttaaaaaaggcttggaaacgggtcaattgtattgccaacgttgttttagattacgacactacaacgaaatcagtgatatcaaattaaatgatgatgatttcttagccttattgaaccaaattggcgacagtgacgcgttgatcgtgaacgtcgtcgatatcttcgattttaacgggagtttaattccagggttacatcgttttatcggcgataaccccgtgattttagtggggaataaggttgatatcttaccatctgctcttaacccaaataaagtgatcaattggattcaaaaagaagcgaaagaacatggcttacatccggttgaaacgatgttggtcagtgctaaaaaagggaattcagttgatgaattattggccgtgattgaacgcgaacgtaaaggccgcgatgtctatgttgttggggtgacgaacgttggtaaatcaacgttgattaaccgcattatcaagcaaactgggattttagatagcgacgtgattacgacgtcacaattcccaggaacgactttagatcgcatcgatattccattgtatgaagatgatcatgcattgattgatacaccagggattatgcatgcccaacaaatggcgcattatttacatgataaagacttacggttgattgcgccgcaaaagcggattaaaccaaaagtataccaattaaatgaacaacaaacattgttcttgggtgggttagctcgttttgatttcattcaaggtgcacggcatggctttgtcggttattttgacaatgaactttacattcaccggactaaacttgaaaatgcagatcaattctacgctaagcaattaggggacatgctacagccaccacatccagaagatttagctgattttccagaactccaacggtatgaattctcaacaaagcaaaagagtgatttagtgtttgctgggttaggctggattacgttaccagaaaatgtcgtggttgcgggatatgcgcctaaaggtgtctcagtcatgattcggaaagcattaatttaattagggaaggaagtatcgcacgtgttaacaggcaaacaaaaacattacttacgcggtttagcgcaaaccactaaaccactttttcaactaggcaaaaacggcttaagccaaacttatttcgaacaaattgaagaggccatcgaaaaacgagaactcgttaagattaacttgttacaaacaacagaagtgaccgttgatgaattagccaacttcttaaaacaacatgacagtcgcatcgaaattgcgcaaaaaattggacgcacattggtgatttataaagcttcacggaaagaaaaataccaaaagatttcaacgattgttactaagctcggacgctaataaggcggtgatcagatgcaaagtgcaacgctaaagcagacaaatcatgtgactgaaccggacgtgttggttgtagaagatggccatcgcttgcaagtcggcattatggggggcacatttaacccgccacacatcggtcatttagtgatggcagaacaagttcgtagccaactcggtctcgataaaattttgtttatgccagatgccaatccaccgcacgttgatgagaaaaaaacattaccagcaaaacaccgtgttgcaatggtagaacgtgccatcgctgacaattcgcattttgaactcgatttaacggagattgaacgtggcggtgtcagttacacctacgatacgatcgtggcattaaaacaacaacaccctgaaatcgattattatttcatcattggcggtgatatggtcgactacttacctacttggtatcgaattgatgatttagtgcagttagtccaatttgttggtgttaaacgaacagggtatgctcaacaaacgccgtatccagtcttatgggtggacgcaccggtaattgatgtcagttcaacgcaaattcgcaataagattcaacaaggctgttcagtgcggtacttgttaccggacccagtctttgaatacattcaaaaagagggcctctatcatgagtgattttgtttatcaagaaaacatcgtgccgtatacacgggctgagttagtggctaaagttgccgctaacttatctgaaagccgatttgaacattgtttgcgtgtggaagccaccgcgattcaattagcacaaaaaaatggcgcagatgttgaacgcgcggcaattgctggtttagtgcatgactatactaagcaattaccagatgaaacgttcattgaagcgattaaaacgcaaggctttgatccagaactactcaattacggtaatgccatctggcacggtgttgttggtgcttatttcattgaacgtgatttagaaatccatgatgaaacgattttaaatgctgtgcgtcgtcatacgattggtgcgccagaaatgaccttgattgatcagattttatttgtggcggattttgtcgaacctgggcgcaattttccgggcgcagaagctgctcgtgagacagcaatggctgatttagcagccggcgtgcggtatgaaatcttaaatacattgacctttttaattcagggcaagaagcagatttatccgaaaacaatcgacacatacaatgcttgggtaccgactcaagccaaataaaggagaactttagtgaaaagtttagatattttaaaaattgctgtgcaagcagctgatagcaaacgagcagaagacatcgtcgcaatgaacatggaaggcatcagtttattagctgattacttcgtgatgttaactgggacgtcagaacgtcaattaggcgcaattattgacgtcattgaagacgcagaagaagaaaatggcgttttcgtaaaacacatcgaaggtaaaaagggttcacgttggatcttgatggactttggcgatatcgttgtcaatgccttcatgccagaagaacgtgccttatacaaccttgaaaaactttgggatcaagcaccacttgttgatgtttccgaatggttggatgaagaatgatttaccaaagctttgcaaccgtctatgaccgtttgatggaccattcattatatggtcaatggcgggattacacgttgcagacgttacaaaataaacatcgagtcctagaactagcttgtggggctggtgatttagccatcttgctaaaacaagcagggctagaggttgtcggcttagatttatcggccgagatgttgagtatcgcttctgaaaaggcttctgaagccgaggtcgagttacctttattacaaggcgacatgcttgacttaggcgaaattgggacgtttgaagcggtcacttgttttgacgactcgatctgttacatgccagatttagcgcatgtccaacaagtttttgaacaagtttatcgaactttagagccaggtggtcaatttctatttgatgcccattcactttatcaaatggatgagcttttcccaggttttatgtataacgataagacggcagaaacggccttcatgtggacgagttacgcaggtgaagtaccacattcagttgaacatgatctcagcttttttatctgggatgacgagattgacggttatcaagaacttaatgaattacaccatgaacgaacttatccggtggtagattatgttgcagcattagaagctgctgggttcaagaatgtatcagtcagtgctgattttggccaagaagccgttcaagaagatagtgtgcgttggttctttagcgcagtgaaataggcggaggacgcatgagaattacggggattattgcggaatataatccgctacataatggacatcggtatcaattgcaacaggcgcgggcagcttcgcacgcagatttagtgattgtctgcatgagcggtaactatgtgcaaagaggtgaacccgcgattttggacaaatggacgcgcgcacaacttgctttgagcaatggtgctgatatggtcgttgaattgccgtttgccagtgctgtccaacctgcagaccgttttgctgatggggccgtcaagttattggcggcgcttggttgtcagaccttagcgtttggcagtgaatatccaacgtttgactatcagcaagtcgggcaacagattttagctttaaaggccaagtcacagacgtttattgattatcaaaaaacttatgcgacgcagctcaatgagttttatcaagcagaattaaatttaaatttagatcaacccaatcacctcttaggggtcagttatgcggttgccaacgcgcaacttgaagtgccaatgcagttgcttgcgattaagcgtgagcaggcacaacacggcgatcaaacgattggcgcgggacaatttgctagtgccagtgctatccgacaggcggcaacaaagggtgatgactgggcacagttagccccagtgatgccgcattcgactttaacagcgctccagactcaatcgcatctggattgggaccaactatggccgctattgaaataccgaattgaaagtacaccccttgcccaacttcggcagatttatcagatgtcagagggcttggagtaccgtttcaaaaaggtgattcattcagtcaatcggtatgccgagttgttacaggcacttaaaacaaagcgatatacgtatgcacgcttgcaacgggtttgtttatacgtcctgttgaatattcaacaaacggatattgaacaatcattagcgcagcggcccatccatttgcttggctttaaccaagtcggccaggcgcatttgcacacgttgaaaaaaacgctcgatcacccacttatcagtaaggtctcagctaaattgggtgccgaagagggcccactggggttagaggtgcgagttgatcgattacaagaacagtttggctggcaatcacagaattttgcccgccaaccgatttttaaccaaagaaaggatgacgagcattgttaaaatggacagtccaatcattattaaaacatcgtgatcatccattgatgtttaaagaaacattgatgttaaaagaaagtttacaaaaaagagaagctgatgtcctagatgctacaccatttgtagtagacggtgaattaacggttgaccagcgcgctgtaattgcacgcgtacatgtggtcgggacattaacagtgccttcaacgcggagtttagatccagtagccttgccaatggattttgaattcactgaaatctacgttgatccagaagacgagcagttgggacgatttacggacgaagatattttgttcccaatcgaaggcgaagccctagagctacaggtagctgttgaagatcacattctcttgcacattccaagtcacatcctaacaccagaagaagaacaagatgatgtgatgccagccggacagtcgtggtcagtcatttctgaagaagcctatgctaagcaacaggctgaagaagaaacggcacccaatcctgaatttgctaagcttaaacaattattagaagaacaaaacaatgacgccgactaagtttggcgtttttttatacccaatttgttaaatggaccggaccaaatcagttaaaatgcttttatttaaagcgtaattctgctaacataaacacagtagacgcgttgtcgttttgatagtcaacaacgcttaaatttagaaatcatttaggaggccttttacatgagtcaaccacaaatcggtgtcatcgggatggcagttatgggcaagaacttagcattaaacattgaaagtcgcggttacaccgttgcgatttataaccgaacaggtgctaagacagaagcagtgatgcaagatcacagcgaaaagaaattggtaccaagctatacaattgaagaatttgttcaatcattagaaaaaccacggcgaatcatcttaatggttaaagccggcgctggtacagatgctgtcatcaacgaattgttacctttattagataaaggtgatattttaatcgatggcgggaacaccttctttggcgatacaattcgtcggaatgctgaactagataagtcaggcattaactttatcggaatgggtgtttctggtggtgaattaggcgcattagaaggcccttcaatgatgccaggcggtcaaaaagaagcttatgaattagttgcaccaatcttagaacaaatgtcagcaaaggctgaagatggccaaccatgtgtcacatacatcgggccaaacggtgctggtcactatgttaagatggtccacaacgggatcgaatatggtgatatggaactcatctcagaaagttataatttattgagaaacgttgttggtttatctgttgaagaaatcgctgatgtcttcaaagaatggaaccacggcgaattagacagttatttaatggaaatcacagcggacatcttaacgcgaaaagatgatttagaaacggataaaccaattgtcgacgtcatcttagatgctgctggtaacaaaggaactggtaagtggagttcacaaagcgcccttgaattgggtgtgccacaatcattgattacagaatctgtttatgcacgttatatttcagcaatgaaagacgaacgggtggctgcaagcaagattttaccagccccaaccgttgctaaattaacagaagataaaaaagaattaatcgaaaagattcgccaagcattgtacttcagcaagatcatgagctatgcgcaaggctttgaacaaatgcgggttgcttcagatcaatatgactggtcattaaactatggcgaaatcgctaagatctggcgtgaaggctgtatcattcgggcccgtttcttacaaaagattacggatgcctttgataaaaaagctgatttaaacaacttattgttggatgattacttcttagatattacaaagaattatcaaggcgctgttcgtgacgtagctgcaatggccatccaacaaggtgtgccagcacctggtttctcagctgctatcacatattttgattcatatcgttcagaagtattaccagcaaacttaatccaagcacaacgcgactactttggtgcgcacacataccaaagaacagaccgcgaaggcacattccattatacttggtataaagaacaatagagtgcgcaagtagacggggatgcgctgaggattagtggaatatcgtaaatgagcggtgaaaccgatcgtttgcggtatgcaactaaccggaagcggatgtctactggagcacgttttagtacaagagtgctgactattgcatttagtcattgagcattaataaaaaattgccattaatcccggttttaggattaatggcaattttagattaagcggaaatggctgcgacgggatgcgcgttttaaaatagagtgatgagtcgaacgtttttggctttaaggattaacagaaaaatgatgcttatggcggttcttagccataagcatcattttacggttaaccggaaaagacagttcgaggaagcacgtttctctaaacacccgagccgattattaaggcgcaggtgttttttcgattattactaaatcgccatcagatgagagtcagattagttagttatttaattggaactatgctagaatggaaaggtaagccgattttggcgcttgaggtttcttagagaattcttatcattgattagaatttagagagtccattaaaaattcttttttggggagtgactaaatgagtcgcatattgattattgaagatgagaaaaatttagctcgatttgtggaacttgaattaaagcatgagggttatgagacagaggtccatttcaatgggcgtactggtttagaagctgccttgaatgaagaatgggacgcgattttattagacttgatgttacctgaattaaacgggttagaagtctgccgtcgggtccgccaagttaagaatacgccaatcattatgatgacggctcgtgattcagtgattgaccgtgtttctgggttagatcatggcgcagacgattatatcgttaagccttttgccattgaagaattattagcgcgtttacgggcattgctacggcgaattgatatcgaaggcgaacataacgctgctaaacaaacgacggttacttaccgtgatttaacggttgaaaaagaaaaccgagttgttcggcgtggtgatgatgtgattgaactaacgaaacgtgaatatgaattattattaacattgatggaaaacgtcaacgttgttttggcacgcgatgtcttactcagcaaagtttggggttacgattcggatgttgaaaccaatgttgtcgatgtttatatccgttacttacgaaataaaattgatcgttctggcgaacaaagttacattcaaacggttcgtggaatgggttatgtgatgcgctcgtgatgcaggacgaaacggtagcatcaacaacaaataagggtcgtaaaatatcgttaaaggtgaaatgggcagctgcggttgggttggccatttttatcacctttgcgattttttcaattgtgatctttagtagtatctctaatatcttgctacacagagaagtcgataatgtgcacgatacggtgaccgtcgtacaagcgagattgtccagcaatgggccacatcttacagaaggctttgtcaccaatcaattggatccgaaccgtcacagccctaaagccatctatcaagatgcggttttaacgcggttagcacaacaggatgttacagttaagatttatgatgcaaacaagaagggtttgtttgcatcgcgcggggcgattggtccgtttccaaaaggcgatacggatacattaaagcgcaaagctatttttggtaagatgcggctgattggcattagtccgattaagacaagtcaaaaccgtgtaattggttatgtagaggtggtcaataacgtccgtgattataaccacgctatgactgaattaagaattgtgttagttgtggttgtcttttttgctatgttatttagtgcattgattggctatttattagccaaccaattcttgcgaccaatcgaagttatgaaaaaaacgatagaagccattaattcagagcctaattcagatgtccgaattcctgagactgggcatagtcaagatgaattatctgatctggtcagtgcgtttaatggtatgttgaatcgaattcagcattatttcgaacagcaagaccagttcgtcagtgatgtttcgcatgagttgcggacaccagttgcgattattgaagggcatctacaactgctcaatcgatgggggaaagatgatccagaggtactggaagaatctttagcggcttcgttacaagaaatcttgcggatgaaaaatttaattcaagaaatgcttgatttaacacgggcagataaagtcgtgactgaaggaacgactgaagtgaccgatgtcggggaagttgttcttcagaattaccataacttcgagatgttatatccagaatttaattttatgctcgacaatgatttgcaccaaccagcgctagtgcatgttaatcgaaatcacttagaacaaattatgattattctgttggataatgcgattaaatattcaacgatacgtaaagaagttcatattgccgtcgctagtgatgagcggtatgcgcaagtggccgtgcaagactttggtgaaggtatttcggaagaagataagaagaaagtctttcaccggttctatcgcgttgacaaagcacggagtcgggaaaaaggtggcaatggattgggattagcaattgcccaacaactcgttgaaggctatgacgggaatgtgtcgctagaaagtagcgttggctacggttctgtttttagagttgagttaccactgattcgtgaagtagaaccaaaatcagaagaaccagttaatacggattaaaaaagcggtgcgcttcaatcatctaattgattgaggcgcaccgcttttttttgttggttaagcttgtggcttatgccgttgcttacctgagttgcgtttgccagctactttaggtgtagcgacagttgggttgcttgtttctgttggtgtttctgtgacgtcggcagctggtttgactgctgctttttgagtgaacatttcttttgtgacaaccgtgacgattggtttttccttaatttcttgatcgatccgttttttaacacgaggcatgatgatgaatgtcgtgattaattgttgaatcaccatgataatcccaccggctaagaaataaagtgctaaaccggctggtgcaaataacgaaatgaagaatgtaatcgcaggactcattaggacggttgtttgcatttgtttcttttgttcagcaggcatcccgactaatgaaagtgcactttgaccgacatataagagggtcgcaatcacagtaatgataatgtttgggctcccaagaccgatcccaaagaagtggctacttgaaatttcaggtgagtattggatggcttgatacaaaccagagaagattggtaattgaattaataaggtcaaacaaccaagacttggcatcatgcttgaatcattttccttataaaccttcatcatcaactggctaagttcagccttttcttcaggggttgttgccgctttttgttgttcttggataatatctaattgcggtttcaagcgacgggtcttttcttgttgggccgtcatcttattcgattggttcaacattaatgggagtaaaatcatccgcacaacgaatgtgatgatgataattgcccagccgtaaccattgatgccaccgaaaacatcagcaatgcgttccataatatgttggagcggcacggcgatgtatttataggatgaaccatagattaagccggttgggactttgggatggctgctcattttttgtggaacacagccagcgagaaagaatgtaacggtcattgtaagcatcgcgagtgtcgcgaagcgtttagaatttttcataaatttagccctttcaagataagtttcaacaagtgtaactatacttgaaggggctaggtttttcaactgacaaccgaaaatttatgacacgctgacacattttcgagcggtgtttgaatgacacggtcgacgcgcccactaggggtgggagaagctttgacagcaccgataaatttttcgagtgcgtctgctgggcccatcgcaataattttaacggagccgtcgtcacgattggcaacggtacctgtgatatggagtttatcggcgaccaatttggtcatccagcgaaatccgacgccttgcacgcggccatagacttcaagttgaattgcattttgcattgtcatcacctcctcttcattgtaagctgttcaacccgatttggcgattaaaaagcgacccttgatagaatttacccactaagtcgcgtataatagaaagtactaaatagactggagcacaacatggaatacattcaatcgaatcaaaacactaaaattaaggcggctaagaaattaaccgttaagaaaaaccaacgtaaagaaaatacgtatctactagagggctggcatttagtccaagaagcaatccaaaataaggccgtcatccgccaagttttcgccactgaaaaatatgtggacgaacgcgcattgcgcggtctttacgatgaaacttttgaaattgcaccagaagtggcgcaacacttgagtgaaactaaagcaccccaaggcatttttgccgttgttgaaatgtctgaaacaccggtaccagaaaaattaacgggtcgttacttattattagatgctgttcaagatcctggtaatatcggcacaatgattcggacagccgacgcagcagactttgccggcgttgttttaggcaatggcagtgttgacttgtataatccaaaactcttgcggtcaatgcaaggcagtcacttccatttaccaatttatcaaggtaacttgatggactggatgaagaaattcaattcgcaagacgtcccagtttatggaacggaattaaatccagaggccatcagttatcaagatgtgcctaaagcaaatgacatggccttgattctaggtaatgaagggaacggcgtgaatgaaaacgtcttagcagccacaacgcaaaatatttacatcccaattccagggaatgctgaatcattaaacgtggcagtcgcagctgggattttaatgttcaagttgattgaagcttaattcttaattttttctaacaaacgtaactttttaaggcgtttaacttcttttttgaacgaaaagctgttatccttgtggcagaatttgaatttaaaaaatgtcaggagtctttgaatgaattcaacagcaaaatggtacgatgacgcggattacatggctctaattgccgatttattagctaaagatgaagtccaaaaattagcgaactatacgcaacatcatcattcagatcgtttggaacattcgctaagcgtctcttatcgcagttatgaacttgccaagaagtggcatcttgatacgcgagcaattgcacgcgcgggcttattacatgatttattctattatgactggcgtgatacgaagttcgatttaggcacacatgcttatatccatccgcgcattgcgcttcggaatgccgaaaaattaacagaactctcacctaaagaaaaagacatcatcgttaaacacatgtggggcgcaactgttagtcgtccgaaatataaggaaagttacattgtatcgatagtcgatgattattgtgctgtgacggaattttgtacaccaatgtggacgaaatttaaacaaaaagttctccgccaaacaccggcaattaacaagtaaagatgcttcaagctgataggttgctttttgcaacctttttcagtacacttcttattaataagtgtgaggtgaaaataatggtgattgtaaaagaaaacgcaaatgctgactgtcaagaggccttccaactgtgtcctaaatttgaaaagactttttcaattttaggtaagaagtggaacggcctgattatcgatgtcctattagaaaacggggcacaacggtttaaaaacttagtgcacagtgtgcctaagtgcagtgatcgcgtattggttgaacgattgaaggaactagaacaagaaggcattgttgcgcggattaccagtgatgattctgcgttgattgaatatcgattgaccactaaaggtgaagaattagcgccagtaatggctgctattcacgattggtcaaacgactggtatgcgacagaagcctagttgctaattgcggttatttacgttaaaatacaattattaaacaaagacgaaaaagagtaacctaatcattagttttcagggagaataatcagttgactgcaagttattcaactaagtttaggtgaaattcactttctgagttgaccattggtccggtattgcccgttagcgcaaacttgagtgtatgactggaatggtcgtaaactagggtggtaccgcgaagcttcgtccctttttgagggacgggctttttttgttgaaaaaaataaggaggaattgcaatgtcattgaaggaacaattagaaaacttacagcaaaagagtctgcaagaaattcaaagagttgttgatttagaggcgttaaatcaaattcgagtggaagtgctcggtaaaaaaggaccgattacagaagttttacgcggcatgcgtgatttaagtaatgaagaacgacctaaggtgggggcatttgctaatgaaatcaagagtgatttggcagaagcaatcgaaacccggaaggcagaattagaagccaagaaggcagcagcccaactggctcacgaaacattagatgttacattacctggccaaccggtcaaaaaagggaccccgcatgtcttaactcaagtgattgatgatttagaagatttatttattggaatgggttatcaagtcgttgctggctatgaagtggaagatgaaaaacataactttgaaatgttaaacatgccagctaatcatccagcccgtgatatgcaagatacgttctatattactaatgatttattgatgcgcacgcacatgtcacccaatgaagcacgtgacttggaaaaccatgactttgctaatggtcccattaagatgattagtcccggccgtgtttaccgccgtgatacagatgatgcaacgcattcgcatcaattctatcaaatggaaggccaagtgattgataaaaacattacaatggcagacttaaagggaaccttagaatacacgattcaccatatttttggtgaagaccgtgatttacgtttccggccaagttactttccattcacggaaccatctgttgaagtggatatttcttgtttccgttgtgatggtaaaggctgtaatgtctgcaagcaaactggctggattgaagttttaggggctgggatgacacatccgaacgtcttaaaagccggcggtgtcgactcagatgtctatggtggattcgcctttgggctcggggttgatcgctttgcaatgttgaaatatggtgtggatgatatccggaacttctacttaaatgacgttcgattcttaaatcaattcacacaggagggctagaccatgaaagtttcttacaactggttaaaagattatttagatttaacaactgccccagaggcattggctgaaaaaattacccgaacagggattgaagtggctgatgtcgcgcaaaagagcgcgggcttgaaaaaaattgtggtgggacatattttaagttgtgaaccccatccggattctgatcacttgaatgtttgccaagtggatgttggtgaagatgaacccttccaaattgtttgtggtgcacccaatgtcgctgctggccaatatgtagtcgttgcattacctaattctcggattgctgacaacgttaagattaaaaaaggcaagatgcgcggcgtggtttcaatggggatgatttgtggcttacaagaaattggctttgccgatagcgttgtgcctaaggaatatgttgatggcatctttgtcttcccagaagcaattgaacctgggacagaagtttatgaagcacttgggatgactgattacattatcgatcttgacctcaccgctaaccgagccgatgcgcttggcatccacggtgtggcccatgaagtggccgccattgaatcattgacacctcattttgaagatatcgtagtgactgaaagcaacgttcaaacagctgatcaattgactgctcaagttgctgatgaacaattagcaccaagttatcacttgcgtatgttgcaaaacgtgaccgtccaaccaagtccaatgtggctacagacgcgtttatggaatgctggcattcgccccattaataaccttgttgatgtgacgaactacatgatgttaacgtatgggcaacctttacacgcgtttgatgcggatgctctaacgggtgatcacaaacaaatcgaagttcgtttagccaagacgggcgaaaaattaacgacccttgatgaaggcaaacatgacttaacaaatgaagatatcgtcattacagatggtcatcgaccaattgcgctagcaggggtcatgggtggtttgaactcacaaattactgctgatacgaaaaatgtgattatcgaagccgcagtttttgcaccaactgcagttcgtaaaacggctcaacgccataacttgcgttcagatgcgtcatcacggtttgaaaaaggcgtgaatgttgctgatgttcaaacagccttagatgctgctgctatgatgatggcagaccttggtaatgggcaagtgactgctggtacagttagcccaactaacttagtgccaactgacaaagtgattgaaatcgaagctgaccggattaatcgcgtcttaggcacagagattgcaacgcaaacaattattgaattattagaacgatttggttttagtgtggtcaatactgataatcatttaacagtaacgattccaccacggcgttgggatattgaaatccaagcggatatcattgaagaagtcgctcgtttatacggttacgataacttaccaagcacattgccaactggcgatatgacaaccggggcattaacgactgaacaaaaggcactccgtaaaacccggcatacacttgaaggtgctggtttaacgcaagcaattagttatgcattaacgacccctgaaaaagcgcgtcaatttacgcttgttgattcggcgctgacagcacttgattggccaatgacgcaagatcatgcgcacttacgcatgaacttgattactggtttattggacgatgctgcttacaatgtggcacgtaaacaaactgatcttgcactatacgaacaaggacgggtatttttaaaacaagcagacgaccaagttcggccaacagaaattgaatatgtggctggcttaatgagtggcaatcgccaaatgaagacttggcaagctgccgcagcaccagttgatttctacacaatcaaaggtgtggttgaaatgttgatggcaagttacaacttagcggatgcaatcagttatcaaccaacacaagcttatccagaaatgcatcctggccgaacggcagccatttacgttggtgaacaactggttggatttgttggtcaaattcatccagcagttgcgaaagctaatcatttaaaagaaacttatgttttccaattagatttagcacaaatcctagccttgccaacccaaacagtgattgctaaaccagcacctaaattccctgaagtaacgcgggatattgcaattcaggtgtctgatcaagtttcaaatgccgcaattgttgaagccatcaaagcaaagggtggcgcccacttagtttcagttgaacttttcgatgtttacgcagggagtcatattgaggctggtgagaagtcaatggcttacaccttaacgtacctcaatgaggcagctactttaacagaagaagaagttaacgctgcttttgaaaaagtagtcgctgaattagttgctacttttgatgccaaaatccgttaatctcgaatctttaatgcaatttttgaataatttggtataatgttttaaggattgtatttaaaagagcaattaggaggtcatcctttgaagaaagttgatcaaaaggagccagtaaatcaagaaaaagcggcacaatcattgtacgaagaacgccgtgcagaaaaaaaagcagcaaataaaattgtctattggattatcggtattctattagcgcttgttgtcattattggattcatgggatatcgctacgtacaagcatctcttaaaccatacgacaccaaagcaaaacaagaaattaccgtgcgcattcccaacggctcaacgaataaacaaatcgctgctattttgcaggataaaaaattaattcgaagcgcgccagtctttaattattatgtgaagactcataatttctcggatttccaagccggttatcatgtgttgaaacaatcaatggggttagataagatcatctctaacttacaaaaagaaggcacaccagcccgtcctcgcgatgtgaagggcaaattgttagttaaagaaggggtcactttagaagaaattgcggccgaagttggtaaacaaacaaaattctctaaagcagccttcatcaaacaagcgaatgataagcaattcttagcaagtttagagaagaaataccctgcattattgtcatcaacaatggctcaaaaggatgtccgctatcacttagaagggtaccttttcccagccacttacgaagtttataaagatagtacattaaaagaaattatcaccgaaatggtttcaacgatggatcaaaagatgcaaccttattatgcaaccattaaggataagaagttaaccgttcaacaaacgttaacgctagcttcattggttgaacgtgaaggggtcacagccgtcgatcgccaaaagattgccggtgtcttctttaaccgtttagacatcgatatgccaattcaatctgatatttcagtaatgtatgcattaaatacccacaagacacacctttataacaaagatactaaagtcgattcaccatataacttatatatcaataaaggttatggcccgggaccgtttaactcacctagtttacagtctgtcacagccgtcttgaatccagctgatcgtgatcaaaattatctctactttgttgctaacttgaagacaggtaaagtatattactcaagaaccttcgaacaacataacgatacaacagattcgattgaagattaggttcatttaggattatcgaagtcgaccgccattggaggtcgacttctgtttgcccaaaaagaagttgagaataaaaggagcgtcccatgtccagtcaaaaaaaagcacccatcattatcggcgttacaggcgggtccggtagcgggaaaacaaccgttagccaggctatcgcccaaaaatttgcgaatcactcagtgatgttattaccacaagatgcgtattacaaacggcaagatgttccgtttgaacaacgccaacaaacgaattatgatcatccagatgcttttgacaacgatttattaatcgaacaagcatcaatgttaaaaaatcatcaagccattgaacaaccggtctatgattataaaattcataatcggacggaggaaattcaacgggttgaaccgcaagatgttattatcttggaggggattcttgtattggctgatgcccggttacgggatttgatggatattaaggtttatgtggatactgatgatgatattcggttattaagacggatgcatcgcgatatggaaagccgtggtcgaacgtttgatgatgtggttggccaatatcttaagacggtaaaacccatgttccatgaattcattgaaccaaccaagcgttacgctgatttaattgtcccagaaggtggcaataatcgcgtggccattgatttacttgtaacaaagattcaatcaatcctaaatgccgattaaagattgagatttgacaaggacgtacacagtaattaagatagtcagtattattaattaaaataaagaggtggataaaatggtacaaaaaacttatccaatgactgcagaaggcaaagaaaagttagccgaagaactagaaacactcaaaatggtaaaacgaccagaagtcattgaccggattaaaattgcacggagctttggtgatttatcagaaaactctgaatatgaatcagctaaagatgaacaaagctcattggaaacacgcatcgcagaagttgagaatatgttacgctttgcagaagtaatcgatgttgatagcatcgcagctgatgaaattgctgttggtaaaacagttagctttacagacgacgaagatggtgaagaagaaacttaccaaatcgttggtgctgcagaatcagacccattcagtggtaaaatttcaaatgattcaccaattgcccaagcattacttggcaaacacgttggtgataaagtagctgtgcaaacaccaggcggcgacatgcacgtcacaattacagaagttaaataaagtgcgtttcgaacgggttagtctttgaggattaacgtaaaaacgggtgttatggtcgaattttgaccatgacgcccgttttgtagttaaccggaaaaggttgttcgaaaaagcacgtttaagaatagagtgcttttgggtgcggttagcaactgagcattaatacaaaattggcagtcatccagattttaggatgactgccaattttagattaagcagaagttgttgcagccaaaaagcacgtttcaaaaaagccacggaaatcaatcccgtggcttttttattttgccgttaattcgttaatcagccttgagacggattggtgtttatctggtttgcttgtataataatattaatcagttgaaaggggaccgtaaatatgccgtttatctggcgcgtttttttaataatagaagcgattatcttcgggacgttcatttggcagatgattacgatacccgcaaatttagtgttcatcattgcaggtattttactcttagtctgggccaacaaacgtcgtagtaaaggtaaaatcggtgtctggacgactttgttaacgatggtcggttgcgtagctgttacggtaccactgttaattaatttctcgttatggttaatgattattgttgcggtcgtctttttagccttaaatcatagccgaatgggacagtttagcagccgcaatatgaatcagttgtttgataatgccccttggcgcaagaaaaaatttattcccgttaatacgacggaacccaccgcgaaaaagacaacagtcaagcggcatagttggtttggtcatcagacaattggcaataacatttttgaatgggatgatattaacttcgcggtcgctgccggtgatacaattatcgatttagggagcaccattttacccaagaatgacaaccatattgtcatccgtaaggggtttggaaagacacggattttagtgcctgtcgggaccggtgtctatcttgatcactctgcaatgttagggagtgtgacaatcgacaatcagcactataatttgaaaaatgagtcgattcagttgtatagtacaaactatgatgaagaaagtcgccaccttaaaatcattaccaacgtaatgattggtgatcttgaggtgatcttagtatgagcaagttaacgcggagctttatatggatcagcacgagtttgttgacgcttctgttttcagtggcgttattttttgcgtatttctacagtacgcatcaggaacaatggctgattagtttggccacgaagcaattattctatgtaccactgattgtttatattgtggtggccgcaatggcagtaggctttttagttaccgcaatcgtctatcttgtcgtacgtaagcaattatcccatactgaaagccagttacaatttttactttctggacagtatgaatcgcctgtttttcagattagacagagcgaaaccaatgactacgcgatgtcaatcgagcaaacagttgaacaattacgccaaaaaatgatacgcttacaacaagagattcaaagttatagtgatcggccgaccgtgattgctggtgaaaccaaggaagaaattctagcgcaagaacggcatcgtttagcacgcgagttacatgattcagtgagtcagcaactatttgcggcgacgatgatgttgtcggcactcagtgaagttgcgcaaaaacaagctgataacgcgcagatgttgcagtccttaacgacagttgaacgggtgttaaatgaggctcaatcagaaatgcgggccttactcttgcatctacgaccagttaatttggaaggcaagagtttacgcgatgggatcattcagttattgaacgaattgaagaccaaaattgcgattcagattacatgggacattgatagcataacgttaccaagtggcatcgaagataatttatttagaattgtccaagagttgctgtcaaacacactacggcatgcgaaggcccaagagattgaagtatacttgaaacaactcggtcagagtgttttactaaaggtaattgatgacgggaccgggtttgatacgaatgctgagcaaaaagccggcagttatgggttaaacaacattgtcgaacgggcccatagtgttggagggacggcaaaaattattagtttgcctaaccagggaacgagtgttgaaattcgagtgccactattaaaggagaccaattaagtgattaatgtattgatagtagacgaccatgaaatggtgcgattaggcatctcaacgtatttaggggttcaagacgatattcatgtcgtcgatcaagccgtcaatggtaaagaaggtgtcgaaaaggcgcttgcattacgtcctgatgcgattttaatggacttagtgatgcctgagatggatggcattgaggccaccaaaacgattttaaaggcgtggcctgaagccaaaatcattatcttaacgagttttatcgatgatgagaaagtttatccggcgattgaagccggtgcggccagttacatattaaaaacttctacagccgaggaaattgccaatacgattcgtaaaacggcgcaaggacaatcggttttagagccagaagtgacgaataagatgatgaatcgcttaacacatccggctgaacctaagctatatgaagacttaactaatcgcgaacgtgaagtcttaggcttgattgccaaaggccgtagtaatcaagagattgcggatgaattattcattacgttaaaaacggtcaagacgcacgtttcaaatattttggcgaagttacaagtggatgatcgcacccaagcggcaatttatgcgattaagaaccaactagtcgattaatcaggaggagttcaacatgcaaattcaggtgtcagatgcagcaagtcaatggtttcgcgacgaattagccttacaatcgggggatgcagtccgcttttttggcaaagtgtatggtcaaacggccgtgcatgatggcttttcattgggcatggaacgcgctactgttgagcagccaattggttcggttgttaaagatggtatcacctattttgcgagtcaatcggacgaatggttttttgccgattatgatttacaggttgattacgatccagagcttgaagaacctaagtatcaatttgaacgtcgttagacgataaaaagccccgccaaatcatttagcggggctttttattttgggttaaaaggcgaccagtacgcgcccagttttatgcgtcttctggctaagttctcgggctaaatcagaaaaggcgaccaagttaactgttggccaaatttccggtttaaacgtcgtggcgagtaattgccagagttctttacggtctttgcgtgggtaatagactgaatcaattccggctaaggtaatcccacgtagaataaacggcatcactgttgtttctagggttgcaccagcggcattgccacaagttgctacgaatccgccggcacaaacttgcggtaagatgtgggctaaaacaggaccgccaagcgtatcaataaccccggtgaatgtctgatggctgagcgctttaagcggaccagcagttaggtcagctgtattaataacatgggtcgcaccaaggtgcaataaataatcggtttgttgcaagtcacgcgtagttgccgttagatttgtgaagccaagctgcgcgaggatggtaagtgcgaaacttccgactccgccagtggcacccgtaattaagagtggggagtcatgatcggctgtaaaggcttggcgtaataatttgctgagcgcaattgcggcggtgaaaccggccgtcccaaactgcatcgtttcagcaagactaagattttcgggcaacttaaagagccattcactagggactttgacatattcagcgtagcccccagcgattgtaatgccagtttcataacccgtacataacacctgatcgcccgcttcaaagaacggattatccgattcgacaacttcgccagcaaaatcaacgccaggtgtcatggggtagtgacgtaagacgccacttttaggattcatagcgagccggtctttgtagttaatatcagaataggcgactttgactaacaccccgtctttagcgaggtctggcgttaacttagtttgataagtggcactgacagtagtatcggtttgttctaaaacgagtgcttgataggcgaccatatgattacaacctcatttctaaataattatttaactccattatacaacaatgttcgctttgaattggcattgcgtctcggaaacggtataattaataggatattagtcaactaataacgagtctgagagtgctaaagataaaggggacgaagaagaagatgcaacaaccaatggtggaatttaaaaatgtcattaaagaatacgacgatgtccaaattttaaagggcatcgacattgcgttggaaaaaggtaagttttataccttacttgggccgtctggctgtggtaagacaactattttaagaattatcgccggatttaccaatgcgtctgccggggatgttttatttgaagggcagaagatgaacgatttaccggccaataagcgccaagtcaatacggtttttcaagattatgccttgtttccccatctaaatgtctttgagaatgttgcatttgggttaaatctacgtaaagttaaaaaagcagcgattaaagaaaaagtgattgaagcccttaaattggtgcgccttgccggatatgagaatcgcgaaattagtgagttatcaggtgggcaacaacaacgagtagcgattgcgcgcgctttggccaatgaaccaaaagtcttgctactagatgaacctctatcagcactcgatatgaaattacgaaaagatatgcaatatgaactacgcgatttacaacaacgattagggattacgttcttatttgtaacgcatgatcaagaagaagccttagcgatgagtgatgaaatttttgttatgaacgaagggcgcgtgttgcaaagtgggacacctgtcgacatttatgacgaaccgatcaaccatttcgtagccgattttatcggggaaagtaacattctgccaggtaaaatggttgctgattatcaagttgaaatggtcggcaagcagttcgaatgtgccgatgccgggatgcgggtcaacgaagcagttgaagtggtgcttcgtcctgaagatctagacattgttgccgttgaccaaggccaattagtggtaacggttgatacgcagctatttcgtggtgactattatgaaattacggcctatgatgcagatcaaaaccggtggttgattcattcaactaacccagctaaagatggtcaacgagtcggcttattctttgaaccagaagacgtgcacatcatgcgttttggggaatcagaagaagatttcgatgcacgacttgaaagttacgaagaggaggactaaggcaattgcgtaaaaaacaatggttatattacttaccatatgccctctggctaattttgttcgtcctcgcaccagtcgcattgattgtgtaccagtccttctttgatatcaatgggcatgcgacattggtcaactacacgacctatttccagtcaggcacttacttgaagatgacattaaattcgttatggtacgcctttttaattacgctgattacgctattaatcagttatccgacggcgtattggcttcatcaaacgaaacataaacaactttggctattattaattattttaccgacatggattaacttattactgaaagcttatgcgtttatcgggatttttagtcaagatggtgccattaatcattttttggggtggttcgggattgggccacaacagattttatttacgaatttcagtttcttagtggtggcgacctatattgaaattccgtttatgattttgccgatatttaatagtttagaagaattgaatccatcattggtcaatgcaagtcgtgatcttggcgcaagtaattggcaaacctttacgaaagtcatcttaccgttaacaatggctggggttaaagccgggatacaggccatctttattccatcgttatccttattcatgttgacgcgtctaatcgggggtaaccgcgtgattacgctggggactgcgattgaagaacacttcctcacaacaatgaactggggaatgggctcgaccatcggggtggtcttaattgtcgccatgggcttaatcatgctggtaaccggggagcaaaaagcaaagaagaaggtgactaacaaatgaaaaaaatgaaatggcaaaacgtttggttagtgcttatctttgtcttattgtacgcaccgattttctatttgattttctattcatttagcagtggggataatatgaatggcttcaaggcatttacctgggcaaattatcaggccttgtttgaagatactcggatgattgaaattgtgttacaaacgttattaatcgcgattctatcatctttatgtgcgacgattgtggggacgtttggggcgttagggatttattcaacgaagcaacggcgtgtgcgcaatatgattttatcgctgaacaatattttaatggtttcacccgatgtcattatcggggcaagttttttaattttcttcacgttcttaggttttggtttgggctttggttcagttttactgagccatatcgctttttcaattccgattgttgtcttgatggttttgccgaagttaaatgaaatgcggccagcattagttgatgcggcacgtgatttaggtgcgactgactggcaagtcctgagtaaagttattttaccgtacattagttccggcatttttgcaggctttttcatggcgttcacctattcgctagatgattttgccgtgaccttctttgtcactgggaacgggtttgaaacgctctccgttgaaatttactccagagcgcgtcaaggaattagtctagaaatcaacgcattatctgccttgatgtttgtcttctccttaatccttgtggccggctactatttattgaatcaaagaagccaagcccaaaaagcacggcgtaaacggaaagcgggggcttaaaatgaataaattaggacgcatcactttagcgattttagtggtctgtgcagccctttggtttgggacggttgaattacaaaaatcacaaggttatacgaaaaataatacattaacattatataactggggcgattatatcgacccagcacttattaaaaagtttgaaaagcaaactggttatcacgtttcggttgagacgtttgatagcaacgaagcgatgtacacgaagattaagcagggtgggactgcttacgatttagcggtgccaagtgagtacatgattgaaaagatgcgcaaagcacacttacttaaaccgattgatcatcgtcgcttaaccggctatcaaaatattggcaaggattttttgaatcaatcatttgatcctgggaataagtattcattgccttatttctggggcacactcgggattatctacaacgatcaattggttaaaaaaccactgacacattggtcagatctatggtcaccagattatcgcggccaaattatggtagtcgatagtgctcgggatatgatggccgtgggcttgatcgaaaatggccagtcagtcaatagcacgaatccggcggttttaaaggcggctaaggacaagcttgatcagatggcaccaaatgtcaaagcgattgtagctgacgaaattaagatgtatatggttcaaaatgaagcgagtgttgctgtgacttggtccggtgaagctgccgagatgttggataataatccccatttgcactatgtaattccagaagagggcagcaatctatggtttgataatctagtgattcccaagacggcaaaacatgaaaaggcggcctatgccttcttaaactttatgttagagcccaaaaacgcggctcaaaatgctgaatatattggttattcaacgcccaatataccggccaaagcactcttgccagcagcaacacggaataacccaggctattatccaagtcaaaaggtgatcgatcgcttgcaagtttatagtgatttatcaccaactgcggttggccgttataatgatttatttttagagtttaaaatgcaacattaaaagtacaatgagcagattgaaatggttcatggtataatagatacagaatttttttggatggaggttacctatgtcatttgaatggtcacagttattaacgtggcggatgctcgcaaatgtgctagacatcatcgttgtctggtattttgtgtataaattaatcatgttgattcgcggtaccaaagccgtccaattgtttaaaggtattatagtcattgcgctgattaaggttatcagttggtacattggtctacgaactgtttcgtacattatggatcaatttatcagctggattgtgattgcgttgatcgttatttttcaacccgaaattagacgtggtttggaacatatcggacgtggatcgctactacgacgcggcgttaatcccaaaattgaacaagaaaataatttaattaaagccctcgataagtcgattcagtatatgtcgaaacggcgtatcggggcgctgattacaattcaaatgaataccggtttggaagattatatcgaaactgggattgatttggatgcggatgtgacgggggagttattaattaacatctttatcccgaatacaccattgcatgatggggcggtcataattcgcgatgataagattgccgttgcggccgcttacctaccactttcagagagtaatttaattcccaaagaattagggaccagacatcgggcagccgttgggattagtgaagtaacggatgctttgacgattgttgtttctgaagaaaccggtggtgtcacattaacgcgcaataacgagttaatgcgtgatttaagccgtgatgattatatgaagtacttcaactcgcatttgattacccaagaggaaaacaaaacgagtctcttacaagaatttgttgatggcttcaaaaaaggaggccagaaatgatgaaaaagtttgttgaaggcccatggctctatcgaattttagcgttatttctagcgttgttactgtttggttatgtcaatttggatgaaattaacacgacgcgccagacgaataacaatgatacacagatgctagcaacccgcacggaaaccgtaaaagtgccgctccagattaatgcggatactggtcggtatttcattaccggctatccacaaaaggtcaaagtgaaattatccgggccgaatgcgctagtcacatcagcagttaacacattaaatttccgcgtgattggcgatttaacgaagctgggtcctggtgatcacaccgtcaagttaaaacagacggggattaataaagatatcaaagtcacgattgaacctaaagaaattaaggtccacattgagcacaaagtgacaaagcaattccctgtgcaggtcaatgttaagaaagaaaacttagcggccgggtatagtctaggaaatccaaaactaagtcaagacgtggttgaagtcagtggtgcaaaatcagcagtgaatgctgtgtcgcaagtagtagccactgttgatcccgatgaaggcaccaaaaaagacatcaatgaagaagtcttgttgcaagctgttgatcgcaatgggaaagcgttaaatgttttaatttcaccacaaaccgttaacgttaagatattggttcaaatgagtaagaaaacactcccgattagtttggaaaagaccggtgaaaaaagtggctacagctacagtctgtcatcaacaactgattcagtgaccgtgtatggtcgtcaaacagctttagccaagttgacgtcgttaccagtgagtgtcgatttatcgtcaatcacgagttcaacttcaaagacggttaaagtggctttaccagacaacatttatgagagtacgccaagtgccattaaggtgacaattacggtgactccagatacgaccaatacgagtgctactaatactgttgaagcgccgtctgaaagtacggcacaaacatcaagtagtgcgcccgttgagtcaagttcaagtaacagccaatcaagtagtcaatcaagctcaagtgaaggtagtaaagcaaataccaatgtaaatcaataatcaacgctaaagattttagcaggatgaatggagataattaaatatgacaaagtattttggaactgatggtgtacgtggcgttgccaacttagaattaagcccagaaatggcttttaaattaggacgtgcgggtggttacgttttgaccaagcacgctgataaggatcaacggccaaaggttttggtggctcgtgacacacgtatttcaggccaaatgttagaacaatctttgatttccggcttattatcagttgggattgaagtcttatcattaggcgtggtgacaacacctgcggttgcctatttaattaaggttcaagaagcaagtgccggcattatgatttcagcctcacataaccccgctatctataatgggattaaattcttcggcgcagatggttacaaattaccagacgcaactgaagaagaaattgaagcaattattgatgccgaagaagatactttaccacgtccagaaggcgctggtctggggacggtggaagaatatccagaaggtgctttgaagtatacccaattcttagaacacacgattcctgatgatttagctgggattaaagtggcattggatggcgcaaacggttcaaccagtggtttaattagccgcgtatttgctgatctagaaacagaatttacaacaacggcaacccatccagatggtttgaatatcaacgatggtgtcggttcaacacacccagaaaatgttgctaaaagagtgcttgaaacaggcgcacaagttggactagcatttgatggtgacggggatcggtgtatcgcagttgacgaattaggtaatattattgatggggacaagattatgttcattctcggtcaatatttatctgataagggtcgtttaaaacaagatacgattgtcacaactgttatgagtaatatcggcttgtataaagcgattgaagccaacaacatgcaatcagtccaaacagacgttggggatcgtcacgtcgttgaagaaatgcgtgaaaaaggctataaccttggtggcgaacaatcaggacacatcatcatctttgattaccacaatacaggtgatgggatgttaaccgggattcaactcttaaacgtcatgaaacaaactggtaagaagttatctgaattagcagcccctgttcaaacttacccacaaaaactcgttaacttaacagttaaggacaaggatgcttggttaacaaatgacaagatccaagctgccattgataccgttgaaaaagaaatgaatggtgatggccgcgtcttggttcgtccaagtgggacagaaccattgctacgagtaatgtgtgaagctgcaacagaagaaaaagtaaatcaatatgctgatcaaatcgcagcggttgttaaagctgaaattggcgcataattaaagggagtgctgacgcgagttggttaggctttgaggattaacagtaaaatgggggttatggtgtttcttgccataatccccattttgcagttcaccggaaatgactactcgagaagcgcgttcaagttggtcaacttttgagcactagcttgaaaagcacgttctcacttgaatcaaactaaaaaagcccgtcaacattgtgttgacgggtttttttggtgcaattttatttaagagcccattcttctaacgcaatgtgacttgttcgtacatcagaaaaccaaagacaaccaataagacaacagcagcggatatcagataccattctttgacaagtatgataggtgcatcagtcaaatgataatttttgcggtaacgtttgagattgaaaacactgacttcattcacgatgattaataaagcgggttctaatagtagcatgtatttactaccggttgaatcgacaatgttattggcggcaatatgtaaggcgattgttttaggtgcaacgacgataaagctcagtccgactaataggccaagaagagaaatacttcgaattaacaagatgctctttttcattacagaaactccttttctaaaattgactggtcttagtatagcataaaagcgctagatagcggaaaatatttggactataccaaaattataaatttatatataccaataaaaatgttgacattaaaatcgttggtgctattatatttaagtgttgtaccaattgattaaagaatattaaaccaaagttgaaaagaggatttttataatgtgtggaatcgtaggcgtaattggcaatgaaaagacaactgaaattttattaaacggattagagaagttggcgtatcgtggttacgattcagcgggcatttacgtgaacagcgaaactgggcaggactacttagttaaagaacccggtaaaattagcgttctagaagcagcggttgggcctgaagtacaaggaacaatcggtgttggtcatacgcgttgggcaacgcatggtgttgcgagtcgtgataatgcgcatccgcatgtttctgaagatggtcgtttttacttggttcacaacggcgtgttaactaactatttagctttaaaagaaacatacttggaggatgtccattttgtcagtcaaaccgatacggaagtcgctgttcagttgattgcttaccttgctaagacagaacaattatcagctaaggaagccttccggaaggctttaacgttgattgaaggctcatacgcatttgtcatggtcgatcgtgatgatcctgacaccttatacgttgctaagaataaatcgccattgttaatcggtgtaggtgatggctttaacgttgtgtgctcggatgcattagcgatgttgaatgaaacaaaagattttattgaaatccatgatcgtgaaatggtgacactcacgaaacaaagtgttcaaattgaagatttagacggcacttttattcaccgtgaaagctatcatgttgaaatggatgctgatgcagcgggcaagggcacatacccccactacatgttaaaagaaatcgacgaacaaccagctgttatgcggcgtttattgaacgaatacgtagctgctgatggagagcttaaaatcgactcagtgttactcagtgcaatgaatgatgcagattgcctctatatcgtggcggctgggacaagttatcatgccggtttaatcgggaagaccttgtttgaaacattaacgcacaagcctgtcgaagtacatgttgctagtgaattcggctatcacatgccgctattatctgaaaagccattctttatctttttaacacaaagtggcgaaactgctgatagtcgccaagtgttggtacaaactaatgccttacattatccaagcttgaccatcactaacagccaagggtcaacactttcacgggaagctgattacacattattattgcatgcaggcccagaaattgcggttgcttcaacgaaagcctacactgcacaaattgcagttgaattattcttggctgttgcgcttggacgccacaatcaactggtgctagcagaacaattcgatgtacatcatgaattaggcttagtcgctactggcatggaaactttattgagcgaaaaagaacagattgaaaccttgacgactgattacttacaaacaacacgcaataccttttatattggtcgtggtgaagattacgccttgagtttagaagctgctttgaagttaaaagaaatttcatacatccaagctgaaggatttgcagccggcgaattaaaacatggcaccatcgctttgattgaagaggggacacccgttattgcattcttaatggatgccaaaacgattgcgcacacgcgtggtaacttacaagaagtgactgcgcgtggggcaaaagccttgacgattgtcagcgaagaatctgctgaagcagatgatcagatcattttaccaaccgtaaacgacttattgacaccattattggggatcattcctggtcaattaattgcttactatgcaagtttgcatagagggtatgatgtagatcagccaagaaacctagctaagagtgtcacggttgaataaataatattcaaaaagcctcgttcaaagaacgaggctttttttgcgtttaatgagttggtgcatatgttgctcgaggaccgccaacgtattttggtcgtgaccgtaaagctgtgacatgtgcactacccaatgtatcaagggttgggcggacagggacttgaacgaatttcacgtgcatcccaatcgccgtatcaccgatatctaatccagcttgtgcaacgatatgttcaacttcaaccggatcactgaattgttcaaatgcagcgacggagcaggcgcctccagcgtgcatagcaggaacaactgagacaatttcaaagtcgtgtgcgcgggcaacctgacgttcaatcaccaaactacggttaatatgttcacagccttgcacggctaaatgaatccccaatggattgagaatgccacgaagtgttgcgatgatgacttcaccgacttctttgctagaagccttaccgatatgaccaccgacgacttcactcgttgaacacccgaggacgaacaaatcaccatttcctaagtgtgcttcgtttagaacatcctgagtcatctttgttaagtcttgttgaatttggtttaattgtaattcgtttgtcatttaaaaaatctcctagtggttaaataattgtggtcgaatacgggataaactagtgactaacgggatggtaaccacgataccaagtccattttgaacaatattactgaaaatcgaagcgattccggcagcccagccgaaaagtaaactggtagctaaaaagtaaccggcaaccatgacgatactaccgcaaatgagggggataatcagctgctttggtcgcattgaatcattacgagtcaggtgacctacaacgaagccttgccccccatgaatgatgagtgagaagagacaccactcagggtaaccagataatagatcgattaataggccactcagggctccgacagtgagtccgccaggatttcgcagcatgatcgccgttgtataaataccgacctcacagagcgtcacaaagcccttcgtcgccggaatcgggatgatgattaacaaagagagtgccacggtcaatgcggtgagcatcgcgagtaatggtaattgacgtttattaaagtgcatgtttagtagccccctgccagacattccccaggccatggcgtagatgaataccatcttttaaaccggcataaacaaatttctttgcgcgtgccacggcaacttcaatcgattttccttgtgctaattccgccgcaatcgctgccgaaagcgtacaaccggcgccatcaatggtagttgtttccaatcgtggagcttctaaataatgagttgttgcgcccgattttaataaatcaacggcctgctcaccagggaatcgttgaccacctttgataatgacgtgcttggggccaaatgattggataattgtagcagcttcgaccatttcctcacgcgtggtaattgacgaaagaccactgagttgttgggcctccaacaagtttggggtgacaacgctcgtcaaaggcagtagttctttttttaacgtgtcgaggtacgcttgctgcgcaagaatggcgccttctttaaagacgaggaccgggtcagcgatgatggttaattcaggatgctgtcgtagtcgctcacagatgccttttaaagtttccgtttgatgaaccaaaccaattttaacgtgcgttagtggcacgtagtttaaaatggcatcaagctggtccaaaatggtatcctcaggtaagttgtggattttcaagtgaccgtctggtagcaatgtagcgatgcaagttaaggcactgaccccaaacgtttctaaggcttcgaacgtttttaaatcggcctggatgccaccaccacccagagtatcagagccggcaatggttagaatgttttgcatagttgtcctccaaaattctattcttaactatcatagagaagaatagaatgttcaacaacagccaattggcttgtttttttaccatccaatttgtaaactaaataagaggtgttaaaaatgattgaatggttacaatatttacctgaacaaaagccaaagtatatggcaattaaaaaaatgattattagcttgatagataaaggacaattaagttcaggtgaccaattaccgccagagcgtcagttagctaaattattgagtgtcaatcgttcaacggtgacacgtgcgtctgatgaattggttgcagatggcgtgattgaacgtcgcgttggtagcgggacgtttgtcagccagcaagcgcgaccacaggcaaggcgggtcaattggcatacttatttgatcagccaacgtcagtcacaaagtcaaaatgaacggcgccaattacaacaactgattagacgaaaacctgaaaagttaattgatgtttattcaagtgacttaccattagaattagtcccacaatttcaatttcctgcattgacgtggcaagattttattactgcacaagcattagagacaccacgaggctatcaaccacttattacggcaattaatcaattggatcaacacaataaacggctattttttaccgaagagcagttattaatgactgccggtgtgcaacaatcactctttttaatattacagggtttattgacgccaggtgatgctgttgcaattgaatcaccctccttttttcatgactcaactttgtttgaagcgacgggtgtccgtgtctatgaagcttcagttgatgctgatgggatttatttgactgctttagaagagctaatcattaagcaccgtgttaagttggttattctcaatccagattatcaaaatccaacggggtacgtaatgagttttcaaaaaagaaaagcagttgttcatttatgccagatgcatcaaataccaatcgtagaagatgatgtctttggttggttaggatttgatacaactaggccaatcccaacgttaaagcaacttgatccggataatgttatttatattagttcgttgtccaaaattatgggggctagtagccgaatcgggtgggtagctgctactccgcaagtcatcgaacagttgacccgtgtgcaacatgaaatggatttagtgccaagcattatggcgcaagtcatggtgaccttagcgatgggggatccgcaatttcaaacgcagttggatcaacttaaggggacgcttcaagaacgtgcacaagcaacctataagatgcttgaaagggtattacccgattggcacgtttacttaccagcgggaggttattatatttgggtgacccatccgaaccataaattacgcttaaaaacctttattgatcatcagcttgctgtcgcaccaggatcattatttgggcttaaaacagatgcgttgcgcatcaattttgcgcgattaaatgcaattgatttggtcgtgctagaacaacgattagtagccattattaaagcaacagaataaagagggggattcggatgacagagcaattcgtaccagagatttatacaccattaaaaaccagtgttgtcggaccacctgctgtggcgcgacaagttggggggattaagatcctcggtaagaagattaaaacaattatttttaccaccgatgttgcgattgtgaataatacaaatgctgacgctgttttggcagtttatccatttacaccacacccagctgtcatgaatgccatcagcaatgtggcgacgatccccgtttttaatgggattggtgggggcttaacggccggcagccggtccgcgtacatgggattattggcagaggccgccggttcgattggcgtggtggttaacgcaccgacctcggtggagacgattaaaatgattaaccgcgttgttgacgttccgattatttgtactgttgtgtcagaacgacaggattacgccgcgcagattgaagctggagtttcaattttaaacgttagtggcgcggctaaaaccccagcaattgttagtgcaattcgccaacaatatcccgaaattccgattatggcaactgggggtaaaaacgaagctagtatattagcgacgattgaagcgggtgcgaatgcattgacgtacacgccaccgaccaatggtgagttatttgctaagaaaatggccgactaccggtctgatttagcatgataacagttgacgtgctatgcaatcctccgtatgataaaaagattactagaggaggtctttgaatgattcgtcaagcaacagttgcagatgccaagagtgtcttaccaatcattaacattgtttttgaagaaatggaaatgccactcttccaaaagattccgttggaggatttatttggtattttagaacaggcctttgcaatgcctgaatatcggtatagttatgctaacacactagtttatgaagaagacggccaagtattggggattgttgtaggcttcccagaagaaaaggaagcccatatcgacgatgcattagcaccgttattcccacaaatcggcttacctgagacaacgcgtttctttaccgataaggaagcacaaccgggggaatggtatttagatacacttgccgtcgctgaacatgcacaggggcatggtgtagggacaaagttacttaaggccttaccagattatttaaaagcacgtggtgaaaaaaagattagcttaagtgtggatttacaaaatcctggcgctaaaaaactttatgaacgaatgggttttgttaaacaaggagatttaatgattggtgatcatcaatatgatcatatgattaaacagctttaacacgaaaagagccgacaacaattgttgtcggctcttttcagattaaagtaatggcataatcattgtcgtccatagccagctcagtggcatgactaagatcattgctggtatcatgtctgcaattggaaattcgcgaattttagcaattctaaagccagtggcgagcatcaagaggccgccgcaagctttgaaatctgcaagcattgttggattcgttagtgggaaaatgagtttggcaagtaagaaaatgatgtaaaagataatgaattgcggaatcgcaatggttgaaacgacggggccaagattgcaggcaaagatggcagcagtaaagaaatctagaattgatttagaaattagaatcgtattgttgcctgtcataccagcatctaatgtcccataaataccggtcccaccggcacaaaagaggacaatcactgtcacgagtgctgaaataaattcggtatctgatagcgtattgtttttacgcggaaaaatttagaaattggccgttccatcaagacggcaccgcgatcaatccagcgaccgaagtgaatgagtaggccaatcccagtaccgagaacaactgcgaagatgactgcaggcatgttcttcatttgaataatggcattgatgcccattcccatcgaagcaacaccgaagattaaggtgagttctgttttaaatttagttgataatttatctcccaataaactaccgaatagaccgccaaataagacggataatgaattaataatcacgccagttggcattgagaagacccctttaattttaagtttgcatattcaaccataccaatttaaaagaaaagaatcaatttaattttaaatgttagcgcttatatatattcgatgggagtcttgagctagaccaaaaaacgactaatcatttgattagtcgtttttttactgactattcgaatcgcaaactaggcttaaaacgccgaatcagtgccttgggttggttataggcccaatgatttaaaacggcggcaatcaaaatacaggggacgatatccttttcttggttgacagtcaattgaaaggctggaccgctgcttgctagaatggtggtcgcttgcatgatgggttgtgtatggtagataatgcgatattgattttgcgttaaatctcccataattaaccaattaagttgtttgacatagataaactcatgccagacgccccagatctttttgagttgaccaatccgttcatcgttttggaaaaggtcaaagtcaggtgaggggctaattgtgacttggcgaatttcaccgagtaagtcgccggtgagtgagtaaaggctgaatacgtcatgccgaatcccacgctttccaataagtaaataacgcggttgttcttgatcgtcaatcacggttgagacaccacgtgaagcactagcctggtgtttaatgtagaaaataggcatcaaagatcacttcttttcagctgtacgattcaagtcaatcgcgtgataaatcgcttgtgcgacgccgtcttgaatgttagttgcagtttgatagttcgcaagttccttaattgttgggacagcattgcccatggcgacaccaatgccagctgttttgatcattgaaaaatcgtttaagttatcaccaattgccattgtttgctcaactggaatccctctttgttcagcataggcggccaaagcgatgcctttttgagcgtcaatgtggtttatttcgatgttattacttgaagaggaagttacaactaaatccccgcgggcttcacaaaatgccttaattggtgctaattcggtcattccctgtgtgctaaaagcgatgattttaagaatcttaaccgttggatcgttaataatcccttgatagtgatcatcgacgtagttaatattcattaattccaaacgggctgctgctaaagcaaccgcaattttataactcgtatcgggattgaggttgacgagtaaatcagcgacattttggatgcgactgactttgctatctgaataattaccggcagtcgtcatgagttcgaagtaaatattattttcgcgtaaattttctgtgacggctgtcaccgtttcggaatcaatcggcacattcaaaacttcattacctaaagaatcaaaaatttgggcaccattcatcgtaattaaagtaggttggatgtcatcactgtcaattagggggagggcttcagaacgactgcggccggtagccaccacgaattcgatgccggcgtcttgggcagctttaatggcggtcatgttaccgtctgaaacctgcattttgtcgtttaataaggtaccgtccatatcagatgcaataattgaaatcaaaggaattcctcctgaaaacgtattattagaaacttacctctatcttagcatgcaagctacttttcttctagcaacttatgttaaaacacgataaactagttaatgaggtgagcagatgaaaacaattattcacaatgagtggcaaacgattctcgcaccagagtttgccaaaccctattatggtcagctccatacctttttgaaacaggaataccaaacgaccacggtttatccagagatgcaccatattttccaagcctttgaatggacaccgtttgaacaggttaaagtcgtcattttaggacaagatccttatcatggcccgaaccaagcccatgggtgtagtttttccgttttaccaggggtcaaagtcccaccatcattgcaaaatatttataaagaattgcagacggatgttggctttcaaccggttcagcatggctatttaaagagttgggcggatcaaggcgtgttcttgttgaacaccgtattgaccgtgcgggcaggtcaatcaaattcgcatcgtaaacaaggttgggaacagctaacggatgcggcgattgctgcattgtcaaatcggggacatgtggtcttcattttatggggaaacgcggcaaaggataaacggcggttaattgatgagacgcaaaatgcggtcattactgcagtacatcccagtcccttgtcagcctatcacggtttctttggctctaaacctttctcacagacgaatactgcccttgagcaatggggcatggggccaattaattggcaattaccacaaacagtcacggtagaataatgaagcgttaccattgttgacttgtcgcggtattagaaacgttgtatgattacattagcaataataaaatgcttactggaggttgcaattgtggatttatttgaaagcttaaaagcaaagattaccaatcggcaatttaaaattgtttttccggaaggaacagaaccaagaattattggtgcagcagcacggttgaatgctgatcggattttgaaacccattttaattggggcaacgaatgatattcaacaaatcgctgctgctaaaggatttaacttggacgggataacgattattgatccacaagaatatccaacagctgactttgaaaaaatggttgccgcttttgtcgaacgccgcaagggcaaggcaacccctgaacaagcacaaacaattttacaagatcctaattattttggcaccatgctggtttatttaaacttagccgacgggatggtttcaggtgccgtgcattcaacaggcgatactgttcgaccagcattacaaattattaaaacaaaaccaggtgtccaacgcacaagcggggccttcattatgcaacgcggtcgcgataacgaacgttacttattctcagattgcgccatcaatattaacccgaatgcgcaagaattggctgaagttgctgtggaatctgcaaagacggctgagttgttcgatatcgatccgaaagttgcgctgttgagcttttcaacgatggggtctgcgaaagcagacgaagtcacgaaggttcaagaagcagcacggattgcacatgaaattgcgccagaattagacattgatggtgacctacaatttgatgccgcatacgtaccagttgttgcgaaccaaaaagcaccagattcaaaagtggcgggtcaagccactgtgtttgttttcccagaattacaatcagggaacattggctacaagattgcccaacgttttgggaatttcgaagccatcggaccaattttacaaggtttgaatcaacccatttctgatttatcacgtgggagcaacgaagaagatgtttacaagttagccatcattacggctgctcaagcattacaaaactaattgaccgacaacaaagacgccagcacagaaaaattgtgctggcgtctttgactttgcgaacagggcttttttcggtataatgacacacagataacaattagaatgaggcagaacatgttagaatttaaaacaactgatccagaacaaacaattgcgattgccaaacagttgggccaacaagtccaagccggtgatgtcttgttgttggatggtgatttaggcgctggtaaaacaacgtttacgaaaggcttggcagctggtctgggaattgaccgctatattaagagtccgacatttacgttaattcgtgagtatcaagacggtcggttaccactctatcatatggatgtgtatcgattggaagaaacgggcgccagtgatttaggcttagaagagtatttcgatggggacggggtttcggtggttgaatggagtcaatttattgctgaagaactaccgagcgattatttgacgattcattttaataaggatgttagcgatgatcaagttcggacgttagtacttgatccgcacggcgctcactacgaagcattggtgcgtactagttttgcagactagtgtaattgacattcggcccgcgcaagcagcagatgcgcgggcttatttatgctttctaaaggcggtcgctaaagaaacacggtatgttgcgttaccagcggagttagccactttaacaccattatttactgaatttttgatagcaagtattcttgaatcgcaacaagatgtattattgcttgcttttgatcaacagcaaattgtcggggcaattcgtgtgaatagtccgacagaacaggggctaacacatatcagtgaagttagtatcgctgttttaaaagcgaagtggcatcgcggaattggctctgatttgatggcgcaccttttagcgtcggttcgagaaataggaaatccgcgacggcttgagttaacagtacaagcccgtaatcaccgtgcaattgcactttacaaacggtttggttttgtgaccgaagcacaattagcagccggattttatgcgccagaaacgggctatattccggttgtgcaaatgtgccaattaatgaatatggatgaggagatttaagatgcaacaacaacgaggacgcggaatttacttagccgtattaggatcaatattttgggggattcaagggccagtatcacagtggctattcactgacacggcaattaagccagaatggctaatgggggttaagatggggctttcaggcctatttctattaggttatgcgctcattaaacaaccgaacgatgtttttacagtgtggcggcaaccgcgggactttacgcggatgttattatttgcagtattagggttatcggccgttcagtatttttattttctaacgattcaagccagcaatgcaccaacgactacgattttacaacagctaggcaccatcatgatcatcttaattagcttggtgatttatcgtagagcacctagccgcgttgaactaattgcagtgactgttgcattgttggggacgtggttgttagtgacaaaaggacaactgacacatttggcgatttcacacgcggcattcggacttagtttatgccttggcttttctggcgctttaaacacattaattccggttaagttattccaaaaatatccaacattagtgattgtgggctgggcgatgttaatcggtggggtggtcttcacatttgttcatccattttgggtcggtgttccaccgttgaatgtggcaacaatcagcagtgtcttattcattgctttgtttgggaccgcgctcgccaatctttgtttcttggggagtttacggtatatcacaccgacaacggctggtttattgaatacctttgaaccattagctgcgactatcggtactgttttattcttgaaaacgagtttcaacacctgggaagtcgtgggtgggattctcgtgatcagtacggtgtttatcttgagtcttggtcaatctaagtcaaaataagttaacacgatgaaccgaattgtggtataattaacagcgaaacaaagctcgtacattagtcaaaacaaattaatgattatgatgaagttgttaatcttgtcgaagccctaatgacaatttagctttaatccaccattcgctaaaagagcggttagcctgtctgcatagacaagttaaccgctctttttttgttagccgattaatttggtggccgcttttagcggttcaacgccaaaatcgttggcttctttaatcagaatcttggcacaagcgatactatcagccagtgcattgtggtgattgtcgagtggaatcgctaggttatcacacaaggtgtttaacttatgattctcaaattgcggatacaaccgccgactcgtcttgagagtatccaacgctaaataatggggttctggaatgtcgtagtgttggagtgtacttttcaacacaccaatatcaaaattcgcattgtgggcgaccactaacttgtttggcgtgaaaaatggtgcgatgtgcggccagacttgattgaacttgggcgcttgagccacatcggcttcatgaatgccatgaatttgcgtattgcgactgctaaaataagtttcaggtttaattaacgtataaaaactatcaacgatttgatcgttgcgcacaacaacaagggcaagtgagcaagcactatgccattgaccgttggcggtttcaaaatccattgcgacaaaattcattattttgaacctcgctttttataaagtttgcttattctaagcgaataaatcttgcgtgtcaagttcgacggggcagtggtcggaaccaaaaatttccgtgtgaatcttggcatcgactaatttaggttggagatcattggaagtaatgaaataatcaatgcgccagccggcattattgtcgcgggcgtggaatcgataactccaccaagaataaatatcgggttgatcaggatagaaataacggaaggtatcggtgaagccgcgatttaagagggttgtcatttgccctcgttcttcatctgaaaagccggcgttatgatgattggtcttatcatttttcagatcaattggttcatgggcaacgtttaaatcaccgcagaaaatgacgggtttttgagtcgataaattagcgatataagtttgaaaggtattctcccaacgcatgcgatagtctaatcgtttcaacttatcctgtgaattgggtgtgtagcaagtgattaaataaaaagtagggtattcaagtgtaatcacgcgtccttcttgatcgtgttcaggttggccgataccataagttgcagtgagcggtttatgcttagtgaagatggcagtaccggaatagccctttttttcagcgtaattaaagtattgatgataacctggtaaatctaattcaacttggccggcttgcatcttagtttcttgcagacagaaaaaatcggcatctagttgattaaaagtgatcataaagtctttttttaaaacggcgcgtaagccattaacgttccaagaaataaatttcattgtcgattcctcatttctaaattccattttaacggtctagtcaataatacgcaaaaaaagtgttggctgttcaattcaagccgtctttgttaaactaggagtagattattttttgaggggaacgacaattgtgacaagtcaagttgaagtatttttacaagcaaaccaagcaatcgagattcatcaagcagaaccattgagcttatacacctttaccaaaacaggtggaccggcagatttactcgcactccccaaatctgttgcagaagtgcggcaattagtggccagtgccaatgaactgacattacccatcacaattatcggtaatgctagtaatctaattgttcgtgacggtggcattaaaggcttagtcatcatcttaacggcgatgaatcagattaaagttgaaggtaacttggtgactgcgcaagctggagcagggattattcaaacctctgaagcagcttatagcggtagtttgaccggcttagaatttgctgccggcattcctggtagtgttggcggtgcggtctttatgaacgccggcgcatatggtggcgaaattagtgatgtactgacccgcgttgatgttttaatgcgcgataatcaagtacagacgttaacggccgctgacttagacttcagttaccggcatagtttaattcaagataacggcagtattgtgttggttgcctattttgaaatggcaacgggtgcggcaccaacaattcgcgcccggatggatgaggtcaacgctttgcgggctgccaaacagccgctagaatatccctcatgtgggagtgtctttaaacgaccagtcggtcattttgtcggaccgttgattcaaaaagcgggcttgcaagggcatcaaattgggggcgcacaagtttctaaaaaacatgccgggttcatcgtgaatattgatcacgcaacggcaacggattatttgacgttgatcgaatacattcaaaaaacgatctgggcgaagtttaatgtgcgcttagaaccagaagtccggattattgggcaacataagcaaggttaaatcaatgatgaaaagctatggtaaaagatgattttatcagggcttttttatcaggatgagcgttttaaaaagaaagggtgttgggatggcaattattgaagctgttattttgttaattacgttggtgattattgccaatatcatcgggcattatttgccaaatttaccggttagtttaattgagatcgggttgggattaatggtggcgttagtatttgccgtcaagattccactaaaaacagattggttcatgttggtgtttgttgcaccattattgtttaacgatggccgtcgttttcctaagaaggaactatgggcgttgcgcggaccaattattgggaatgcgattttcctcgtctttgcaacgacgttaattggcggcttggccattcattggttagtcccggcgttaccgctggctgcaagttttgcgttagcggcaatcttgtcgccaacggatccggtggcggtacaatcgatttcagaacaggccgatttaccgccccgggttttgcacttagtgagtggtgaaagtttaattaacgatgccagtggcttgattagctttaaatatgggattgctgccgctgttaccggctatttctcatggcaacaagccgcgggcgattttctgtatattagtattgttggcgcactagcggggatgattatcatgttaatcattcattttattcgcctatttatgctacaagaaggctttgaagatgtgatgttccatacgattttacagttggtgacaccgtttatcatctatctaattgttgaagatctattccacgcatccggtgtgattgcggtggtggtagctgggatcatcagtcattcatcacggaatatcttcctcgattttttaccggagttgaagttagtgaccgaacaaacttggtcaatcagtgtttacttattaaacgggattgtctttttaattttagggattgaattacctgtcgctatgcataataccgtgcataatccgctgattaatacgagtgaagaaattctcctcgtcttagcggtttggttgattctggtgattgtgcggggactctggacactagcttacttgctctacaccaaccagacgaatcccaaaacattccgcgaaaacattaaaattgcagtgctctctggactttctggggttcgtggagcgattacgatggccggggtattatcggtgccaactgttttagcggatggttcaccgtttcctcaacgcggcttaatgctctttattgcggccggcgtgattattgtcagtctggtgatggccgttgtcttaattcctaagctgacaaaagtcaaagcaccaatcgagatgcgagggatgcaacgagatcttgaagccgaagcagccgcagaagatgaagcagctgctgatttattggatgaaacaaacgctaagatttacatgtacaaagtagcagcgagcatggtcgaatcccaacggcatattgataataaccgggctgctttagatttattggcagagtatcagttgatgatccgccggttggagagtcaacaaagcgaagcaagcacaagtgacgaactaccaccgttaattgctgaagagttgattttgcgacaagtggcatttgacggagaacgtcagaagttagagttattatgggctgaaaaggccattagtgctaaaagctatcggcatggtaaacgtaagttacggcaaaaacaagtaatgttatcggttattgggacgagttttaattggcatcatgtgcaactacaagtctatcgtgcttggtcaatcagcaaacgctttttgacgcatctctggccgcggcataccaaatcaccaagtgaaaccgagtggcaattgactgaacgtgaaatggctaaggcgggaattaaacaattgtcgtatttcctaaaacagcctgaaaatcgccaacgtcattataatcgtcaggttatttatcaaattattgtgcggtatcggaatcagattgaaaacatgaaaaatggggggcggagtaagactgctatctatgaacgtcaattacaaaaattaagaatcaaagcgctcacgagtgaacgagtggcgattcaagagttattggaacaacataaaatttcatggcaacttgcagatgaattacgcaaaaacattaactattccgaaaatacactgatcttagcacgaacggatactgaatagattcaaaaaagccccacgcactcattttaaattgagtgcgtggggctttttttgatggttagaataagtggcggcggcggtagtatttgtagctgtaataaccaccaattgcaaagccggcgctgattagtgaaatcgtcaaaccccaatagaaataaggtggccagtatttaagggtaacggtatggtgaccttttttcagcgggatggcgatgaagttcttcaagccgcgtttgattttaaccggatggccgtcaaccgttgcatgccaaccagcagcataggggacggttgtcatgaggacttggttttgttgaggaatggtgatcgttcctttgatggttgtgtttgagaaagtattcagtttcaatgcatgtgcacgaagttgctgcgttaggtgcgtcaatgcttgataattcaaactatataaattaatattttggagccaaatttcctttttagagaagctaaggtcaacggtttgttgttggccgattgcgttacttgtcaggtttaagacgacagtatcgcggaaagtatcgtattgttgtagcgtgtgaccgtttaatgagacctgaaccgcatttttttcgaggtttgagcctaatgtgaggtaataggggtcactcgttgtgggtgtgaaggtatagatgacgtgagctggattcttcggatcaacccggaggaaagtttcgttgagttttggtttttgtttagcattcttgtaagtgacagtattgaaaaattgaagtgtgaagagtggctgttctgtcgctgaattgactaagtctgccgcaatctggttctgttcaaggatgggataattggcaaccacatgatgtttaagcactttttcagaggccgcaaagcctaaatcaagtgcgttggggttttgataaattgcaatttgatctttttttttgagtaagttataacgtgctaagtccggcttattcgtactgagtggaattgttgcttgcccactagtattgttaaggtagtagcgataacctaataacgcatcggtgaacagggtctgattagtatcggcaacggcgccatcgccagctggttcgccaatgctgcccatgaatttcggatagctcagttcgagcatcgaattaaaatgagatccgccgaaataatcagcttgcatcgggtcattttttgtccgcataaaggttttgccaattcgttgaaacgcggttttatttggaattgcgctaatggctgattgtaaatgagctgtataatctgcgtaatctttttgtgagacatagctaatttgattaagactcattgtcgcgttggtgaccatctcaccaccgacgcatagaactaagagcaaaggataatagtgcttgagcggctttttcaggagtaaaagcaagcatgtcatcagtaagaaagcgatgcttaagttaatctgattaggacttagcgcggtgaagctcttgagatgtttggcagtataaccaaaagccgccatcaacattaaaaacggcaacaagagttgataccaactaaatcgaaggtgctggtggagccgttgaaccgcgagcacgattagccaaaagctaaccacatatgaaaagcggtaaggataccaaaccggaaattgcatgccgtgccataataaatcaaggggttcataacacattgaaacacctaagaaaatggtgactaataaggcaactaaccgttcttgccaggcaatcttgcgtgttccaaaatacaagatggcacaaatcaatacgagactgccgacgaatatattcggttcgccttttggcatttggtcgaagttaaaattgccaatcacaagtttagaaagcatcttaagcggattatattcgaacttccaatgaatcttttgaatggtgtactgccctttgctctgcgtcaattggaaaaaagttggcaataggagccaggctgagagtaaaccggccaagagtgagccactgatgaagcgggcagcgctttgccatagatggcgccaagtttgccaataatgagcacaagcccacgcaaaataagcaatgacaaacaggcaaaccatatagcccatataatagttactcattaagagtgcggcaagactcaatggataaagccaaaagtgacggcctgtaaagagccggtcgatgcctaagacaactagtggaagccagacgagtgcatccaaccacataacgttaaactggttggcaattgcaaacccggataaggcgtagacaacactaagtgtcggtaaccaccagctatggagtagtttgttagattttaagtagtacgcaaagctaagaccactggcgcctgttttgaaaaggacaagcagccaaacaccaaaactcaaccaagttcctggtgtcaataggacgattagattgaatggactcatcaaatagtaagcccagaccccaagcatgtcgccccctaagcccttagcaaaggaataaaaaaaagtttcgggatggtgcaatagcgtacttctgaaaaaagcgtaaaaatcgatgtattgttggcctagatcaacagtcaggattgtttgccctccaaaagggaacacttgtcgaagtagtccgtagataaataaaatgccaaatggtagtaagaaactaaggcctaatgtataatgacgacgtgcaaaagcgtaaaatcgactcacggtaatcctccaattaataaaaaaatctaaaaattaggttgctagtccgtttttaactgagaaaagctgtaaaatataaccagttaatgactatgcttaagcataccataatctcgtttgaatttagagatttggcatagcttgtttaagataattttgctaaacttaaacaatacagcacaaaatcgctcaaaaggtcgcttggcgactttttgaagcatagagcggcgccatcttttactagagcggcgctaaataaggagtatctgaccgtctgtgaaaatcattaagagaaaaaacaaacaaaatcgtgaaaaatcactgattccattccgcttaaatttcctattattcgttgtcttcgcgttatttgccgcgttgattatgcaattgggacgcctgcaagtgatggagggcgctaattttcaagcgatggtcaacagtactgataagaaaatcgttacaggtaacgtgcctcgagggatgattctggattcaaagggccgtgtcttagttgggaatactgctaaaccggcgattacttatacgaagaatatgaatgtcttggcagacaaaatgtatgcagagggcaataagttaacccaatatttaacggtcccgacggataagttaactgaacgtgatcagattgattactacctcagtaaccccaagaatcttaaaaaatggaacgcaaaactgcctaaatctgcgaaggttgccagtgatggttctgagttgccagaaaagaaggtttatcaatcaacaatcgaattggttaaaaagtcgtttaaagggttaaacgagcaacaaaaacaagccgctgcgattttcaaaattatgagtggggcttatcaattatcgacagtttatattaaaaatacggatgtgactgataaggaaattgctgaaatcagtgaacatctaacgagtttgccggggattaatgtcagcaccgattgggaacgggcttatcctaatggcgattcaatgcgcagtattattgggcatgtttcaactgaagagcaagggttaccagaagatggcgttaactccttgctagcacagggctattcgcgtaatgatcgcgttgggaccagttatttagaaaagcaatacgaaagtgtcttgcatggttctaagtcgcaatcacaagttgaagttggtgcgaataatcagattctctcaagtaatgtcttatttaaagggcaaaaagggagtaatttaaatttaacaattgaccaagcttatcaaacgcaagtggaagcggctttgaagaaagtctatgatcaggcaaaagcagcgggagccactcagtattctgatggtgcctatgccgtggcgatgaatccgaaaacaggtgctattttagcaatggctggcgaatccaacgatcgtaagtcaggtgaaattgccgatgatgcgctcggggtgattaatcacaccttcgtcatggggtctgctattaaaggggcgaccgttatggggggcttaatggatggtgtgattacgccaaccaataataccttaccggatacaccaatctatttaagaggaacgccggttaagaaatctgtttacccagttgggacgtttggatcattgaacgctgaatcagcgttggaagtttcttctaatatttacatgatgcaattagcgatgttagaagggcatgccaaatatgtacccaattcttcgttaacgatggattcagatatctttacgaagatgcgtggctacttcagtcaatttggcttaggacaaaagactgggattgatttgccaggtgaagccaccgggatcgaagggccaaccgtcaatgaatatggcgagccagccaatggttcattacttgatttatcttatggtaactacgatgcctacaccttaattcaattggcacaatacatttcaaccatcgcaaacggtggtcaacgaatgaaaccataccttgtggattcgattcaacaaactggtaacgatgggtcagctggccaagttggtaccaagaccacgccgacagtgcttagcacagttgatgcgcccgaaagttactttaatgtcgttaaaaaagggatgtacaacgttgtcaatgggaccaacgcttgggggacagcacacaccttgaaagatattaaaccaacgcttggcgctaaaaccgggacggcacaatcatttgcccgtgaagatccaaacgattcgacaagtaagcaagtcgaaaccgttacttctagtttggttggctttgctccatacgataatccgcaagtggcaatcgccattgtgttcccgaacttaaactctgataaagggcactacaatacgttactagcccgtgaaatgattacgagtttctataaattaaataacattactgaatgaaatattccaaaataaccttttcagataccataaaaaatggtatgatactaagagtctaagaattaaacagttttttagaaatttacttacagcttggaggctatatcaatgcgtgttcacattacaatggaatgtacagaatgtcacgaacgtagttacttatcaaacaaaaataaacgtaacaatccagatcgcttggaattaaagaaatattgcccacgcgaacgcaaagtaactttacaccgcgaaactaaataatagtgacgcacatcaaaagtcggggcgcttcgcgctcgggctttttttgttaaggaggcttttgaatgcggactaaaaagcaaattcggcaacaacaaattgcggcattacaaacgcttgcgcagacgcctgcgcttaaacatgcccaagaagcacaacttttggaattgttaatggcaaccgaggtgtttcaaaaggcaacaatcatcggtgtcacgttgagtcagccaattgaaatggcgacccagccggtaattgatgccattcgtttggccggtaaagaagttgtagtgcccaagacattgccagagcgacaaatggctttttacccgttaacggcaaccactgaattaacaacgagttcctatggtgctttagaaccagtggttacagctgggagccaggtgttaatccctgatttaatgattgtgccgggactagcatttagtccagaaggttggcgggttggttttggtggcggttattatgatcgttatctcgccaaatatccaatgccaactgttgcactagcgcttaaaccacaacaacgaagtgctgattgggccattgatgaattcgatatccaactcgatcaggttcttcaggtctaaaggagaaaagatgactaattttaaagaacgttggcaagacgcaccgattgtggtgtatgccttgatggtactaacgattttgatgtttgcaatgatgtttttgaatccggttgtatggttgaacggctttacatcggttaacatgctaatgaatggccggattattgggtttatgatggcatctgtcaatcatggccggtttatgaatctcttcgtagatttggttattttgttttttgttggtggacaacttgaacgattattaggacactggcgcctattagctatctatatactgagcagtttggcgagtttgtttacaacgggcgctttttttggtctcgatacaccaaccgtgactgctggaacagctatcttagggctattcggtggcttcttgatgttaggtgatgcctttaaagaagaatccgtgctaggacaagtggcacgccagtattggctgtttttatttttaacaatcggattacaatttattgtcgatcacaatgcattgtacgcaatggtaggtggggtacttggcggctttttaagtagtatggcgctgggtgcacctaaagtgggtaagattaacccgctgaaccgtgtggtgagtgggttaatttatgttgcaacgatgattttatttggttttctgggtatgaatcattaatcaatttatgtataatgttaaaggtgaagttgatgagaactctatatgatgtacaacaacttttaaaacaatttggcgtttacgtccatcttggtaaacgactttgggatatcgagctcaccagtatcgaattacggcacgtttatgatgcggggttaatcgatggcaaagtgtatcgtgatgctaagatggttttagtgcgtgaacatcggttggagaaaaatgaagcgtttaatcacaatttattggaggagaagtttaaatgacagacaagaagttaatcggcgttgatttaggcgggacaactgctaaatttgcaattatgacaatggatggcgaaatccaacaacgctggagtatcgatacggatattttagatgaaggtagccacattacaccggatatcattgaatcgattaatcatcatttagatttatataacatgacacctgctgatttcatcgggattggtatgggcacacctggtagtgttaacagtaaagaagggaccgttattggtgcttacaacttaaactggaagacaacccaatacttacgtcgcgatatcgaagctggcacacacatgaagcttgcaattgataacgatgccaacgttgctgctttaggtgaacgttggaagggtgctggtgaaaaccaacccgatgttgcttttgtcacacttggcactggagttggcggcgggatcgttgctgatggccatttattacacggtgttgctggttctgcaggtgaattaggccacgtaacagttgaaccacatggttatgaatgtacgtgtggcaaacaaggttgtttagaaacttatgcttcagcaaccggtgttgtgcgcgttgcacgtgacatggctgaagaatacgctggtaattcaaaattaaagacaatgttggatgatggtgaagaaatcagctctaaattagtttttgacatggctaaagaatcagatgcattggctgttaaggttgttgatcgtgtttcttactaccttggtttagcattagctaacgttgggaacatgttgaatcccgcttacatcgttatcggtggtggtgtttcagctgctggggaatttttacgtaaacaagttgaagcttactttgaagaatttacattcccaaatgttaaaaatacgactaagattcgtttagcaaacttaggaaacgtagccggtgttatcggggctgcttcacttgcacttcaatttgatcaacaataatttgttataagggagtcttatcgatgcttgtattagggacaattaatgtatgggtagtaattaatattattctgatcgccattttactttggttcttgggcgattgggcatattatcaaattcaacgcaaacgcttaggcggcgaattaacggaagcggcgtttgaagaaacaatgcgcaaggcccaaattgtcgacttacgggataaaaaagattttgatgcaggccacattttaggcgcccgcaacttaccttatccaatgttgaaacaaaatatgggtgaactacggatggacttaccagtctacttatatgatgcaggcattacgctcagtatccgagcagcactgaagttaagaaaagccggtttcaccgacattaaatggttgaaaaagggttatgctggttggaccggcaaaacaaagcgtaaaaagaaattaaattaaaccaaaaaagcccaagagttactagcgaaaaaaactagtcaactgttgggctttttatagagtgcgcaggcagatggtcatactctgaggattagtggcataccgtaaatgagcggcagagccgatcgtttgcggtatgtaactaaccgaaagagtatatctggcggcgcacgtttcaaaacagagtgcgtttaaagcggtttgactctgagcattagcatagtattgttaatgaccgacaaagtcggtcgtttgcaatacgaagctaatcccaagagtcagctttaaaaagcacgtttccacaaaaaaagtccgtcgccaatcaggcaacggacgcagtcttttcaaagcgcttagccttggtgagctgaatggctcttacggttagcacgtcgacgactttcttcaatttgattttctttttcttcgattggatcaacgacggtcttcttaaatgccaagagtgaaccggcaatcgcgccgactgttgaaacggttccgattacgaaaccttttagaaatttatgtttcataggtaaagcctcctcaagtctcaattcattcaagtacaactttattatcgcgtatttaagcgcgaatagctagtaaaatacgttaattaatgtggtgaaaatatggaaaaagaaaagctaatcgtcattgttggtccgacaggcgttggtaaaacagcgttaagtctacaactcgcacaacagttgcaaggtgagattatttccggggatgcgatgcaggtttatcgccagttagacatcggtacggccaaagtcacaccaaaagagcaggcgcttgcgccgcaccacttaattgatgtggcggatatcgatcaacgcttcactgcctttgactttcaacagcaaggacaacaactcgtcactgaaatcgtcggccggcaacacatgcccttggttgttggtggaacgggactttatttgcaggcgttactgtacgatatgaccctgggtagtgcgcaagatgcggaacagaattttacgattcgtcaaaaatggcaaacttttttggatcagcattctgaagaagctttgtggcagacgcttaatcaaattgatccgcaagcagccgctaaaattccgagtgcgaatccacggcgtgtggttcgcgcattagaggtttatgaaacaacgggaactttgttttcacaacaaaagccaaaagaattacgttatgatacgtttattattggattgaattgtgaccgtgcattattatacgagcgaatcaaccagcgggtggatcaaatgatcgatgctggacttttagaagaagcgcggttggcttatgcacatcgtgaaacgagtccgcaagccgtgcgggggattgggtataaagagttcttcccatactttgatagtgactgttcattagacgtggcaattgctcaagtaaaacaaaattcacggcactacgcaaaacgacaactaacgtggtttagaaaccagattccggtcaattggtataatctggttgaacaacctgaagccgatttggctcggattcaaaccgatttacaacaatggttacagcaataatagaaatggagtggttaaaaaatggattggcaagcaaacttagcaccagaattacaagctaaaatcgcggcagttgatacgcaaatcgcaccgcgtttacaagcactggatgaacaaatcatcaataatcaagcaaaggtgctcgaagcgtttcaagcagaaaatatttctgaatcgcatttaaacgggacaaccggttacggcaacgatgatcaaggacgcgataagttagaggccgtctatagtcacgttttcaaaactgaagatgcgcttgtgcggccgcaattggtttccggcacacacgcgattggaacggccttattggggatgttgcggcctggcgatgatcttttatatcttacgggcgaaccatatgatacgttgcaagaagtcatcgggatggccggtaacgggattggttcactaaaagaattccaaattggattcgattttgtgccattattagctgatggtgccgtggattttgaaacggcccggaccaaaattacagctaagacaaaagtggtcgctatccaacgttcacgtggctatgctgatcgcgatagtttcacggttgataaaatcaaggaaatgattgcctttgtcaaaaacattaaccctgaattgattgtctttgtcgataatgcttacggtgaattctctgaaacaacggaaccaacagaattcggggccgacgtaatggccggttctttaatcaaaaatgctggtggtgggattgcgcaaacgggtggttacatcgtcgggactgaaaaattaatcgaaatgattggttatcgcctgactgtgccaggtgttggtgccagtgaaggcgccacacaaggcaatctgcaattgatgtttgaaggtttcttcttagcaccaagtgtgactggtaatgcgattaaaggggctgtttttgaagcagcgcttttggagcaaatgggcttgagtgtctcacctaaatgggatgcccctagaacagacttgatccaaacggtgaacttcggtaatccggatgatatggttaagttcgctggttgtgttcaagcgcaatcaccaatcgattcatttgtgacccccattccaagtgattttgccggttacgaagatcaaatcgtaatggctgccgggacctttatccaaggtgccagcatcgaattttcagcagacggcccattgcgcgccccatatacactttacttacaaggtgggttaacttacgcgcacgttaaactcgcgattagtcgggcagtccaaacaaccttctttgaaaaataaatgccaagcggtcaatcaaattcgcgtttgattgaccgctttttttgtgcgttaagcatggtatgataagggtgcaacgaatcgtagcggtcggttttaagagatgctttggattgttgctagtataaatgtgtcattctcgctacggtaagtcttggaggtggttaggtgttaattggtcaacaattaaaacaatttcgtttggatgcgaactactctcaacagacactcgcagagcagattaatgtgtcacgacaagtcatttctaaatgggagacggataaaagtgcaccagacttgaatacattggttgttcttgccaaattatataatgtaagtttgaatactttgctcggggttgaaacggtcactaaaccgaattcattctttgggcggttgcggcaacattggcatttggcagaaagcgaaaatacaaaaccgctgtccgatttaggacggattatgcaacaacccgaacaacactatgtggatttagcacaacagttcagtgccactttgacggatgtaactgttactagtgatggccaaacaatgccagcgaattggcggcaagcacggagtccttatttaattgtattagaaccgcgccaaatttgtttaaagcagacagatgttttaaaagtcatgcccgcaaaagttgttaagcaacttgcgacaacggaaattcgaacaattcattatgcggtcatgcagactgctggaccatcaaccattggcgggttacaaggtatcgggcacgcttatcgggccatcgtgacggttgatacaaagcaatccgtagcaccatactatattaccaaccaggattttcttcagttggcaaaagttctgaaagcttatgcacaacaggaacacgttcaatttgatgatcagatggctttgctgccttattttatgacgcatgacacaactgactgctttaattatttagaggtacattacagcgaattagcggaaaaagttggggttccagcagaaagcgcaggacaggcggtttatcgatggtagatgaaacagcaaaaaacaactttgaaacggcgacagatggggttcaggcttatcacaattattttggcacgccaacgcacgatgatcgtatttggtttgaactcttaacagttggggtcttccaagtggggttgagctggaaagtagctgcaagtaaaataccagttctgcgacaacaaatggtggggatggtgattgatcaagtcgcacaatttgatgaaatggatgttgaacgcctgcaaaaagaaccagatatgattcgtaatacgcgtaagattcgggcaacgattcaaaatgcgcgggcaattcaagccatccaaactgaatatggcagtttttcagcgtatttgtgggcgtttgttgatggtcagccgcaattgcttgattcacaaatggctggcgtgtccgataaatcagcgccgatcagtacgcaacttgcgaaagagttaaagaagcgccagtttaaatttgttggaccggtggtaacgcatttgtttatgcttgcaggtggtttgattcaaatcatcgatgaagactaatgcctaaaaggtaaaccaaattggtttacctttttttgttggctgatgttagaaaatctgacatcaaatgttgaccgtttgaaaggcgactggtaagataaaacgcaagtgaggtgaaatggatggctgaaaaacacttaaggcgcaacttagcagttttaccaattggtacggtaatgaaattgacgggacaaactgcgcgtcaaattcgttattatgaagcacaggcgcttgtttttcctgaacggacaacgggccatcaacggttgttttcgttgaacgatgttgatcgtttgttggaaatcaaggattacctagctgaaggcaccacgatggcacagattcgccagatttatcagaagaaggcggatcggcagcgtgataaacaattatcagacgaaaaagcgcggcggttattggccaatgaattattatcggtcggcggcttagttggacaacagtcaaccatttcacaatcatctaaattatattaaggggcgacggattaatggcacgtaaagtattgacagcagaagcaatcaagcaattagtggatcaagaaaacgttaagttcttacgtttaatgtttacggatatcaacgggattatcaagaatgtggaagtaccaattagtcaattagataaagttttaagtaacaaaatgatgtttgacggttcttcaatcgacggttttgtccggattgaagaaagtgatatgtatttgcggcctgatttaagtacatggctcattttcccatgggaagcggaacatggaaaagtcgcgcggttaatctgttctgtctataccgcagatggagaaccattcttaggcgatccacggaataatttgaagaaattagtgcgcgaaatgcaagataaagggttcaaagactttaacattggaccggaaccagaatttttcctctttaaattagatgaatacggtaaaccaacgctgaaactcaacgaccaaggcggctactttgattttgcccccgttgatttaggcgaaaactgtcggcgtgatattgttttggaacttgaaaagatgggctttgaagttgaagccagtcatcacgaagtcgcacccggacaacacgaaatcgattttaaatacgctgatgcagtcgatgcagcggataacatccaaacctttaaattagtcgttaaaacaatcgctcggaaacatggattacatgcaaccttcatgccaaaaccattacacggtgtcaacggctctgggatgcacattaatatgtcactctttaatcaagatggtacgaatgccttctacgatgaaaaaggtacagaacaactttccgaaacggcttatcatttcttagctggcttattgcaacacgcacgcgccatcacggcaatcaacaacccaacagttaactcttacaaacgattagtccctggttttgaggcaccggtttatgttgcatggtctggtcataaccggtcaccattgattcgggtcccacaatcacgcgggttatcaacgcgtctcgaactacggagtgttgatccaagtgccaatccttatttagcaatcgggtcgattttggcagccggtttatctggcttagatcaagggctcttgcctgatgctggtgtggatcgcaacatctatagcatggacgaaacagaacggaaggaaaatcacatcactgacctaccatccacattgcacaatgcattgaaggaactagccaaggatgagattatcaaagattcaatggggccttatctctaccagagcttcatggattctaaatcattggaatgggcagcttatcgtcaacaagtttccgaatgggaacgcgaacaatatttggaactctattagtcgcaatttacgccatgtttttgtacaattaaactttagaaatagaaagttggcagagtatgaaaacattggtgattatcagccatcccgaaattgagacgtcgatggtccaaaactttttaaaagcgagtgcagcaccactggaagccatcacttggcaccacttagatgcgcttgagacgttagatgtggctgctgaacaagcattattacgcaaccatgagcggattatttttcaatttccgctctattggtatgctgctccagcgagcttaaaaatgtggttggacaccgttttaacggggcaatttgcctttaatggccgccaaccattagccgggaaaacactcggggttgtcgtttcaactggtacggcggctaaacattttcaagctggcggcagtgaacaagcaacgctgtctgaaattttgcgcccatatgaattggtggctcgtaagctagggatgacctatttaccaccacttgcgattcatcaattgggttattggcaagaaactgataaacaatgcttggtcatcgattatcaacggtatttgacgcaatccgagttcaattttgatcagcaattagcgtggtttgaagcgatgctgactaaaaaggctgctgaagccacatcgcctgaagcgcaacaacgtttaatgcttttaagcgaacaattcgccgacaaacgatcggaattaaccgatttgaattggcaagtccaactgattcgcgaagaagagggggaaggctaatggattggttaacagaacaaattcaactacaaaaagaacaagccacaacgtatgaagagcaagctttttatacggcgcttcaacaaacgagtgatgaactagcattacggattgaacaacgccaaggtgaacttgatggtcgaatctggaatgcaacgaattggtaaactaatacaaaataaaaaacgccgcgacgaaagtcggggcgttttttgtgtaattcgattaatagcgtttgattaatgtatcgaaagcatcaacgattgcttggaagaaaccaagtgtatctgggtttgtgatttcttgattgtcatctaataagttcatgacattgccgatataagcttctggttgttgaaccgttggcatgttcaagaaaacaagtgattgacgtaagtggtggttagcaccgaaaccactgattgcaccaggtgaaacgctgacgatttcagctggtttgttatcccagatgcttgcaccataaggacgtgaaccaacgtctaaagcatttttcaatacggctggtactgaacggttgtattctggtgtgacgaataaaacggcgtccattgtcttcattttatttctgaaagttgtgtaagcttctggtacttgatctaaatcatcataatcttggttgtacaatggtaagtcaccaatttcaacaatttctagattataatctgatgggaataatggcatcaatgatttagcaactgatttgctaaatgaatctttccgtaaactaccaattaaaactgcgatattttttgtcatagtgaaacctccaattgttttacttattattagtaagtaactttagtatagcacgttcccctgaaaaggcaaccacttttacttactaatttaagcatagcgaattggtgaagcttttagcaaacaatatggtcggccattgattggcattggcaagctataaatcgtataatagcagtaagtagaacaaagatgggaaatgaataatggaaattaaatggcacgtcaatcaaccacaatctgttaaacaattcttgctagcaagtggcatcagtcaacgattgtacgccaaaattaaggcgttaggccaaccgattctagtaaacgggcaaaaaagtgcgcctagtgatcaggtacaatgcggcgatgtggtcacattgcagttaccagctgaactggccgatgaatcagttgctgttagtcacgaaccaatcactatttgttatgagaacgagtattggttggcggtcaataaaccagctggcttggcaacgattccgggtcccactaatcaaacggatactttgttgaatcgcattaagggttactggcaagcgcagggtgcaacagatttagtaccgcatatcattacgcgcttggattttgatacaagtggaattgttttagtcggcaaacaccaaattgcacaaagtctattgcaaccgcagattgaacagcatcaattacaaaaattctatttagcagttgtttcaggaacgggtttaccagcatcaggggatattcgtgaaccgattggacaaatcgaccatcaaccgcggcgtgaggtgttggcggatggtcagtcagcttggacgagttattggcgcttgggtgcatcgggtcagttgacggcggttaaagttcagattcatactgggcggacgcatcagattcgggttcacttcagcgcgttaggctatccattggtgggtgatcagctctatgatgggccgcttgatttagggataacgcgacaagcattgcacgcgtatcgactgcaatttcaagatccattcagtcaacaatcaatctcgattacagcaccgattgcagccgatatccaagcgattctacctacagaacgattaccaattgattgattcaaaggaagatgacaaatgaaaaaatggcaatggttactaatttgtatcttgtgtttcggcattggtggggttatcggtcatgtagcgactggtccaacaacggtgccatcgattattcagccaacttcggccaccgcaaaccagcccgttattttcgtaccggggagtaatggaacagttgaagggtttaatggcacctttgctaaattgaaccgtcaagccacacgccatgttttaaaagtaacggtattaaaaaatggtcacttgaaaaccagtggtcgctttgatcaaaaaatacaacaccccgtgattgtggttgcgtttgaaaacaatgcagatggtaatgagaacgtctttaaacaatccgaatggtttaaattggcagcaggtaaattagctaaacaataccactttacgcattttggtggggttggttattccaacggtgggcttgtattaacgcggtatgctgagcgtagtggaagtggaccgaagattacgcgattactgacgttgggaacgccatataatggcatgtcggagcacatcactcaggaaacaccgatgttagctgatttaaagagccgccggcaacatttatccaaagacttagtggtctattcagtcggcggcacaattaacgataagaatgatgggattgtcccagcagcgagtgttgcggctggtcggctcatttttcaaaagcaagttgctgattatatgacaatttcggtgagccagcaccatgcagcccatactgaattgccggataatccaaccgtcatttcactgattcaacaattgatgtttaaataaaaaaaggtgtgtcgcagcaagttgagctgtgacacacctttttaatactattgatcgattgttttcaagagattccgcgtgatgagcattccaatgatgaagattaaaatttctgttaatgggacactcacccaaacaccggttaatccgaaaaggctagaaagaaccaagacgctcgcaatcaaaacgatgtagccccgcatgatggccacgaaaaatgacaatcgaggttgcgcaatggcggtcatgaataagttattgacgatgttcatgcttgagaagaaaaaactaatgaaaatcaagggaatgccagcagacgcgtagcgaatcagttgttggttgtgttcatggttaaaaatttcgatgatcggtaatttaagaccaatcaaaacgagatataatcctaccgcaatcccgagtgcggaaagcaaaccgattttgagactcgttttgacattatcccaatgatgtttcccaaattcgcgactaacgattggctgaaccccgactgcaacaccgttgaatagggatagaccaactagtaagatgttggcgataatgccgtaagcggcgatggcatagttattactgagatggagaataacaatgttaaagacgaaaatgctgaccccagtactcatttcagttaagaaagatgggaaaccgagttgaattgctttgaacgtcggtttaaaacgtaaggttaagtgctgcaaagttagtaaccgttgtgggtgatgccggtgttgtgtcaaaatgagtaggctgacgattggcgaacaaatcgtagccatcgcagcacccatcatgcccatgtgtagggggaacattaagaggtaatcgaagataatgacgaataagctttgtgaaagtgtcgcaatcattgtcaaatgtggattactatcgttacgtacgaaacttaagactaagttattgatgataaataagggactgccaattaaaataattcgtaaataggtcaagcttggggcgagcgtttcatgattggcacccagtaagtggagtagtgggtgaataaaaattaagccgagcgccatgatgatgaggcctaataaaatcccaaaagaaagaacttgagtgaaaatcgagcgactcttttcgggatgcttgctcttgttaattgagaaaatcgtggcgcccccaatcccgagcatcagacctaaaccgttaaataagttaaaaatgggcagatcaatattcaaagcggccaagccaattggtccgactgcgtaagcgataaaatatgtgtccgctaaaatatagatggataagcctaacgagctgaaaacgtcacggatgatgtagcccgttaattcttttttgatatgtggtgagttttccaaaataacactcctattcaattggtagtggggtcgccattaataacgcaataaatgattgaattggtgctggcaaattcttccgggcgacaaggtagaattggcgttgatattgttgggacaatggtcgatagggaatttctgggtaatcaagtaaggctgcgctagaaactaatgattggccgataccctgtcttaatagttggataatcatcgcattgcttttgatggtcatcacgttttcgagtggtaaattattttctttgacgtaattcatcgtgtagtgatagacgccagaaccctgttcacgaagtaaccaaggttcattcgggcgacctgctaggaccagttgatcggtctgtagtggcgtccgaatcaagtctttttcggttaatggtttttcaatgaaaccaaagtctagtttgtgctgcgtcaattcttgaacaatctgcgatgagttgagtgtactgatatctaaggcgagtgtttcaagggctggccgatgcgctttaagcagggttggcaataagtaggttgcagtggtgtgcgaggcgccaattcggcacggtgtttttggctggccatcttgatgatggagtgcgtgcaaatcttggtcccataaatcaagaagttgttgtgcttgttggtagaagagatcagcactcttagtcggcgtcatctgctggcgcccattgcgttcaaatagtgtgacccccagcgcatcttccaattgtttaatttgcacagaaacggtcggctgcgatagaaaaagcagttgcgcagccgttgtaaaattcttggtttcataaacggttttaaaagttgttaaaattttaaacatatcatcacttctattcgttatcttaataacaactattataaagatttattttattaattgaaagagtttcggtatagtttaagataacaagtgagaaggagtaaagcaatggacaatataacaaaaaaaatacctggctttgcgttatcgttagcgattgcgattgccagttattacatcgctaaattatggttaccaatgttaggcggcgcaacgattgcgctttttgtcggcatcgtacttggcaatacttggttgcaacaaccggtattagcagccggaactaagttttccgagaaaaaattattggaatattcagtcatgttactgggtgcgacaattacattccaaagtattcaacaaatcggctggcatggtgtgctgtttaccgtgttacaaatgagttgtacgattggatttgccatctggtttggccgccggttgcaatttagcgaaggtacctatttattgatggccggtgggaatgccgtttgtggctcgagtgcgattggggcaattgcgcccgtcatcgatgccgataacgaagataccggcattgcgattacattggtaaatctaatggggaccatcttgatgttactcttgccagttattggaacgttgatgtggggacataataatgaactccgtggcgtgttaattggtggaacagtgcagtcagttggtcaagtggttgccagtgcgacgatgattaaccaaggaacggttgtcacagcgaccttattcaaaattttacggattatctgtttggtttttgttgtcagcggttttggttacttacatcaaaagaaacaaagtaaagtcagtgatacaaaactgagcgaacaattattagcgaagaagagtagcttagtgccatggtacgtgattggcttcctattattctgcgtcttaaatagcttacgggtttttccaagccaatttggtacactgtgccatttcttgagtacatggtgtgaaacaacggcgttagcagccattgggttacgcttgaacttaaaggcactcttcagccaaggtaaacgtttattagcatatgccggcggattagtgaccgtacaggtagtcctcgcgattttattaattacactattattctagggcgtgtcagcagctaggatgtttctaggaatattgaattattaaaaaatctgccatcaacaattttgttgatggcagatttttttgttattaagcttggtaagtgccgacttgaacggcttgttttaaagtggctggtgtgtgatgtgacttggcgaaaaattcgcttaaatcacgtccggctgttaaacctttaaaatgtttgccgccttgccaaggggcgattgcggaaaggtcataaacgacgccatcaacggcaacgtatgcgggttgaccatcttgaccgttatattgagcgagtgtttcttttgtaaagactttatctgtcatgattaaaaatctccttcgaattgtgaatgggttaccaataatatagcgctagatgcagaagttggcaacgattaagttgtgcactttgaaaatgaataatgttgaggctagcgaattagagaattattcgtgaccttaaatactgttcttcaaataataatttgttaaaataatcataattgggggggatgaaaatggacaataaaaaagactggttgatgcgacaagttgattcttttgcggaaggaatgggttatttgttatcgaaacaaagtggtaattcacagtcggaggttgtctttccacaagaaaatgctaaaaaattgccttttcaaagggaattggcaagtttaattgctaccaacgatactagaggggccgcccaacgattattaaaattacaatacgcaatgcctgaagaacaatttctacagttaggtacatggttattattagaaatgaagcaggacagttttcctaatcctttaacccgtgaagcgctgacagacgttttaaatacgattaattaaataattgaacgaaaaaaccaccctaataaataatagggtggttttatttaatattgatggacccgaccagattcgaactggcgacctcctacatgcgaagcaggcgctctcccaactgagctacgggcccaaacgcttacaaaaatattttagcacttttagctaaaatagcaaggcgaattagtgacgggcagatgttctgaggttatttgcttttttgccacctttaatcgtgcgggttttgaagtgggcttgttggctatcaggaacgaacttgaagtgttgcattttcccggcatagggttggccactgaggcgaatcttcaaccaatcttgcatggcttcaatcattccagtcagtttttcggcttgttcagaatttgcttgtttttggacttcggttgtaacatcgttagtgagataagccaataatttttgatgataggcaattagttcttctgtgagtggcgcttggttatattgattgaaaagtttttgaacaaaacgcattgcatctttagcgttttgtggttggtaaaagcgatcttgatcagacatagaatttccctctttcttcagagtagtataacgaataatagtgctcgtcacaaccgtgtgctttggtataatagagaaatactagtttttcggaggtcagcaatgtttaaacgtaaaagtgattggttcttagtggctgcactggtgatgatggcgatcttattttacagttcttcaatgacgtatcatgaacaaacatcggtgcccactttggaacgatttctcaagaatgaaccacttaaggcttggttaagtcaattttcgttccattatgcaggcagtgaacagagtgtaaaagcatctgggtatttcaaatttgtggagtttttcgtgcgaaaaggcgcccattttgggacgtatttcttattggcggcttttagttatttagggctacggccacgcgtaaccggtggttttttagcagttatctttagttggctggcagcaaccgggtatgcggccacggacgaatttcaccaaatgttgactggtgatcggacgccactttttcaagatgtgatgttggacagtgttggcgcattaacggggattgtgattgtttgcgcactacagtggatttttacacaaaaaaagagacgatagcccgactatcattgcttttagcatggtaatttgctatcatagaaaacgacttagtaccagaattctataatcgaaaagaggagttagatatgtcaggacattcaaaatggcataatattcagggtcgtaaaaacgcacaagatgcaaaacgcggcaagattttccaaaaactatcccgtgagcttttcatggctgcgagaagtggcggtcctgacccaagttctaacgccgcattacgtttaattatggataaagcacgttcagctaacatgcctaaagataatatcaaacgggcaattgataaagctgacggtagcgatggcgcgaactacgatgaaattacttatgaaggctatgcaccaggtggtgttgccgttttagtgcacgctttaactgacaataagaaccggacaagttcagacgttcgtgttgcatttactcgtaatggcgggacaatgggtgcttctggctcagttgcttacatgtttgatcgtcgtggttacattgcgattgcacgtgaaggcttagatgttgatgaagatcaaatgtttgaagacattctagaagctggcgcggatgatttacaaactgaagaagacgtgtttgaaatttacacagatcctaaggaattagcaaatgtccgtgatattcttgaaaagaaatacacattggcaaatgctgaattaacaatgattccacaaaatacaacaccggttgatcctgaaaaagcagaacaattccaacgtttaattgatgctttggaagacaacgatgatgttcaagaagtttatacagctggcgaactaccagaagaagactaatttgtttgataagtgcgttgcaagtaattgcaacgcactttttttgtgcagaaaattatccggttatttgcgtatctttggttagtcaggaaggagggacgagatgaccgaagtattaacaacccttttgcaaaagtgcgcaacggaaaaagcgcaggatctttattttcgaccactatcgacgggttgggcaattattgaacgcttagcgacaggactaaagccgttacaaaaagttactctgtcagaaggcaatcaatggctcaatcaaatgaagtatcaaggggggatggatatcagtgaaactcggcgtccacagaccggccgttcagcgatcgaggtggcaggcgaattgatttatttacggttggcaaccgtgggggattttttgaatcgggaaagtttagttgttcgtttcatttatcccattgggcagacttatcattgcgacgactcgcagattttaagtcgtttaatgcagttaattcagcaaccaggattattgctatttgccggtccaactggttcagggaagacaacaagtttgtactatcttgcggaacaagtcatgcaagataagatggtggttgcgattgaagatccgatagagattcaacagccagctttcttacagttacaggtgaatgaagccgcagggttaacctatgcagcattgttgaaaatcagtttgcgattacggcctgataccttaattattggtgagattcgcgacttacagacggcccaacacgcggtttctgcggcgttgagcggtcacttggtactaagtacgattcacgcgcgaagtacaacgggggtgatggaccgtctattagatcttggaattagccactcacaattaaccgcttgtttagcgggtgttgcctatcaatcactagtggtcgaaggccacaatgtagcggcccactatgagttagcaactgcacaacagttggaggaggctgttcatgaagactaaaaccactgttcaattcaatactgaatttatgttgctgttagggcgcttactgcaaaatggtttttctttacaacaagcacttgagttcatgccgattgtttttccgacacaaaagcagtggctgcatcaggtgcaaactgggttagaagcaggaaaacgactagcaccaagcttagcggcggtttcgtttccaacacaccttgttgcacagattgaattgactgagttgcagggaaacttaggcgagtgtttgttacatcttggccaattacagcgaattcaacagaaacggcgtagagagttagttggcgtaattgcctatccctgttttctactcctttttctcggggcgttgattgggatgatgcagatttatctttttccggaaatcgcgcagtttaacccaacaacttcggcgacatcaccattacaactattttttagagtgatggggacattcgttattatggctggtggtctgattagtgtgtatttattccgttggcatcggcgaccgctattacaacgattggcggcggcatttagatggcccttcatcggtaaaacgttgcaggcttactatcagtattgcttattatttgatttagcgacttgcctgaataacggcttaaacttggccgaaatgcatcagcttacacatcgtttggcgaaaacatcgtggcttgtacaattaatgcaacaacttgaaacggctgtccaaaaggggggcacgctattagcgaacttagcggatggcgttttttatccacctgagctgcaattagtgctcgctaagggaagtccgttacaacagatggccaaggaggttgatctgcttgcagtcattaaatacgatgaactgcaacggcaattgaaacagaaggtgaattggctacaaccgctcttgtttatcctaattgggatcatcattatttgtacctatctcagtattttattaccgctatatcatacaatggagggaatttcatgaagaagaaaagaaatgcatttacattgatcgaaatggtcgttgtgctagctgtgatagcaatgttagtcttgttaattgcacctaatttaatgcatcagaaagagacagctgagcaaaaaacggatacggctctagtggcaacgattcaaacacaagttgaattagctgaggatgacggtaaaacggtgtcgagtctagccgatttagcatcaggtgaaaaatatttaaccaataatcaggttaaacaagctgaaaaacgcggcataacaattaaggacaataaagttgttcaaaatacaaaataaggcgttcactttaatcgagagctgtcttgttttgttcattgttggagtagtcagtttatttgcgttgcaacatattcgagattatcgtgcacggcaggcggagcgtttattttttgaacaatttgaagcgtcttggcatgcgactcgcgaatatgtcgctgttgagccgcataatgtgcacttatcttgggatcaaaccaaccacacgttgcattacacaagtgcggatccacaataccaaagtatggatatcccgattccagaaacattgatgtgcgtcgatccagaaacatggtttaggatccaatttaatcatgactcagctgctagaccgcggtcattgatttgtcggtctaaaattgatgggcaccgttatgaatatcgggtccagatgatgtgggggatgttacatgttaagaagtagaccggcatttctattaatagaacaaatcgtggcgttaagtcttctcctgatgggaggcttgaccttgacaatgagtctacggcagtttaaagcacatcaagttcaacggcggtgtgctgctacagaatatgctgtaatggcaatggctgccaatcgattggcaaatgagcagccgccacgagcacaatggcagttgcaacgggaaacataccaagtcgtcaccaaaaaacaggccatttatgtcacaaataaagcgggtgagcgagttgcacttcaatggtattgttactaaacgctctggatttacactgattgaaatggttgtagctctcgttattctgatattgagcagtcaattaatattggcaaccactaaaacactaacgcacacaacgcaattaacccagatggaacgtcagaatattaattggcacattagtatgattgaacttgatcgttttctggatgacgctcaatttatttcaattgaacaggcgaattatgaacagcaattaaccgtcgctaaagattcgaaacgacgctataccttaacgaaaactaagaaggaactggtggtttcgagtacgaagaatggttatatgcctctgtttgatggggtctcgcggttaaaaatggtgtatcatgaaccttttttagaactcgaagcgcgcttaagcgatgggacagcctatcaacatgaatgttttttggaggcgcaacatgacacgaaaaatacagattaaacgctctgcagtcgcgctcttgaatgcagttttgatgttgagcttggtgacaagtgcgttgttgattgtgacccacagttaccaacagcaacaacagagttacgtcagtttgactaactattaccaaacgcaaatcttgcttaaattaacaaataaagcgcggcaaactcagtcaattcaaggtataaagactaacatcggtaagagtcgtatcgaccagcaacacaagttaatcatcattgagttaaacaatggttatcgaaaacagtttccagatcagaatgaaacagatcaaggataaattttctatttgataaagcgcttactatgatttataattctaggtatacccacctgtattacttgctttgccgttagaataccgatagaatataacaggaatctaatgaatagaggtggctattttgcctaagagtgctgtagaaacgttgtttgatcaactcgatcaaacaacacaattaattgaaaagaatttagaaacaacctatttggatgcactcaccgagaccattgctaatattgcagatggtggccgcgtaaaggttgaagacggcttaccagatgctgccactgttgcacaactagaaccgctttatgcggcggttaatctcaaccaatttgaagcagaagaaattcgccaagcattacagttggcaacgctcaagggtttgcgtcaagttaaagtggaaccaaacaagcaaatgacaccagatgcgatcggctatcttgtagcttatttggcagaggtttttggtggtgctgaccaaatcaagacaattttggacccagttgttggaacggggaacttattggcaaccgtaatcaatcatatccaaaaactaacggggaataccgtgcaaggttttggggttgataatgatgatagtttgttggaaattgcgggcatcagtagtgaattgcagaagcattcaacaacctttttccatcaggatgcgattgaaccgctactggttaaaccagttgatatcgccgttgcggatctaccaattggtttttatccattagatgaacgggcggctgattttgaaacccacgctgccagtggtcattcatatgcacatcacttgttgattgaacaaacgatgcattatgtgaaagaaggcggctatggctttttcctagtaccaaatgtgattttggaaacggatgaagctaagcaactgattaaatgggtgacaaaacatgtctatttgcaaggcttattgagtttaccagcaaacttgtttaagactaaggaaggtcaaaaagcaattttagtccttcaaaaacaaggtgccggggctaaacaagtggaccaaattttattaggtgaatttccaaattctaacgatcaaaaggcgtttgcaacgtatctacagaagatccggacttggcataaagataatttacaataatcgaatagaaaaggtgattagatgtcaaaagtattagcaattaacgctggtagttctacccttaaatggaagttatttatcatgcctgaagaacaagttgtcgcacaagggatggttgatcgtttaggattatccgattcagtctttaccgttaaatacggggatggtcaaaaattctcaatgacccaggatattaagacgcaagatgttgcggttgatttgttattgaagaagttaatcgaatttaaaatcatcaatgaatatagtgaaattagtgggattggtcatcgggtcgttgccggtggggaagactttaagtcatccgcattaattgatgaagcgtcattaaaacggattgaagaattgtcagaatacgcaccattacacaatcctgctgaagcaggtgttatccgtgctttccgcaagattttacatgatgtaccacaggttgctgtttttgatacatctttccatacaacgatgcctgaagaaaattatctttacagtttgccgttggaatattatcacaagtatggagcacgaaaatacggtgcccacgggactagtcatcggtatgtttcccaccgtgctgctgaaatgttaggcaaaccattggaagaattaaagatgattaccatgcatcttggtagtggtgtttcagtgactgctattaaagacggtaaatcgttggatacatccatgggctttacaccacttgcaggggtgacaatgagtacgcgttcaggggacattgacgcatcactcgttgcatttttaatggaaaaattaaacattaaagatccagcagaaatgatcgatattttgaatactaaatcaggtatttatgggatttctggattatctcctgatatgcgcgatcttgaaaaaacgcgtgaagaacgtccagaatcacaattggcaattgatatcttcgtcaatcgtttaatcaagtatgttggttcatacgttgccattatgggtggtcttgatgtcctagtgattacagccggaatgggtgaaggtgacatcttaatgcgccaacgcatcgccgatcgcttgagtttctttggcgttaaagttgatccagaacgcaataacgtgatggctcaagaacgcgtcatcagcgctgacgattctcgcgttaaagtattattagtaccaactaatgaagaagtaatgattgccagagacgttgttgaaattggccacgtctaaggcatcagtgaaaatgaccagcgcatggctggtcattttttagtggagggaatgggaatatgacaggttttacattattttatggcttattggcaattgccttgctcattatctggctgattgttgaaacgaaaatggtttggcgcgcaaaacggaatcgactatggacgatttttttatgttgtgctggaatcctcttactaggtttaacgttagtgatgggcagaacgctcagcgatcaaatcacaggtatcggctctgttgtaattttaattgtgattgctttttggcctcgtggtttaaccaaaacaagtttgattgcaaacttaaatactattcatcaatttgcagcgatttctaagattgaattactaacacaaggtgacttagtcgaagcttgtttttatgtcggtgaaattcggattgccaagttgcgctttaaaacgacggtagaaaaattacaaacctttttaaaagaccggtttcctaagaaacgcttaggggtgaaatagggttaaagtctttcatattactggctgatatgctaaactagtatttgcatatcggggccgttacggattcgacatgtgtaggtgagcgtgagttgcacttcgtaggttacgtctacgttaacaacgttacagttaattataactgcaaacaataacaattcttacgctgtagctgcctaaacaccagcatagcgtgatccgcctgacttcacccaagggttagatccgggtctcaaattaattgggttacgttaaacgctgccgtttgaggtgtttaaaagagatttgcaaactagctagttcatccgagcttctgtcggacggcgttttggactagcgaactcctaaatcgttcgactatgagtgtagagattgacgtggcaatgcgcatggacgcgggttcaacccccgccggctccattagataacaaggtgttaagcagaattaggcgcttaacaaaaggcgattaacactaccgtaacggtgttaatcgccttttttgtttgcaaaaaaataacagccacacgtgtgactgttacattaattgcttatgcccaacggtttgtttttgttggtaagagcattaggatatagaaccaaattgtcccgataagcggtatgaattcaatgagtacccaccagcctgagcggtctgtatcgtgaagtcggcgcattttaacggataaagttgcaatccaaacaatgaagacgacgatgttacgacccattgagatgcctaaatccccaatattatagatttctgaaattggatggccggttattgtttgaataataccgatgataataccacctagaatgtagttaatgatgattggccaccagaaatcaggtcggtttgaagtgcctgagaaatcaaaaatccgggaccaaaaactttgatatgatttaaccatgatgtaaaacccccttctccttatcagcttttcgcgtcgtcagttctggacgagatgaaaagttatgataaatttaataacttcctaccaaagatattatgacatacttaaacgagttttttacagtttttagcttacatagagaatcaataatttattcgccaacgcccattaatgaagcaagaatgaataataaccaaatgtgaattgggtagaacaagtagaagaaatacttcatgctacgtcctttttgtccgttgtacaagaggattgggataatcgcgaagatcatcatccattgcgtattgctagtgaagagtccagtgaaggcaaatccggagttgattccagcgtcaaggaatgcgaaaacaagaacggtaagacattgtaagagccggttgtttcggaaaagataaaaaaatactcctatgtagaggagaaggccattttccgcaagcataatggttggaataaccattgcgagattggcagcaaacatcattgtcttagggttagcaattagaccaagcgccaataatgataagaggataggagcaataattgccagtccaccaagcaaaatttgtttggaatggtgcgtgcggcgaccgacactaatttcttgaatcccatacattgctaaaacggcaatgtataaatcggtaaaaatattgtttgacagtgcgaggttaccgacttcgaagaagtgttggacaatggggcttcccaagttcataatccaaaaaccaacgagtaattggaacatgtaacgtttttgattccgcgtatgtatgaatccttcaactgccataaagaagaagatggtggcaactggtcgtccgaaccaatcaacccagccagggaccccagccccggcgaacatttggtgcacgtgatcaataaacatgaggataattccaattacgttgatgtcgaagttatttaaaacttgatatgatttagtctgcataatagcctccctaaaagttaagtaagtacattatcgtatgtttagctcatattattaagttttaaatggctagtgacaataatgttagatagcaaaaaccacgataaaaggaatttatcgtggttctgagcttatttagcaatttggcttgtgccatctgcgtaatttaatgtaacgccgtcttggacgttaaaaatgtaagtgttaaattgaatgctgttatccccgacggattggccttccatttgaacgccgcgggctagcagctcattatcgttaaaaataggtgtgacacggtaacgaacaaaacgattagggtgttttttgagataataagcaatatctgattcatgggccagcatttcgggtgcgtttagctggcgtgttcctgtcatcagattctttggattattattttcaccggttagttgatagccaattaaatgactccgattatacagccagccagatttaatccgcttattatgccaaccggtcggattccaagtgagtccttcgcgcttggcagtaggcatcatcgattgatttaaaagaacatttgcagcaccaacgcgatttagtgcgtcgagattactaaaggtttgccaaccaccgtgatcggtagccaaatcagtagcactgaagcttggttggttattattgacgagtacctcgttttcaccacggtaggtgagggccgcgagctctgatgtgttatgacgctcaagactagtcgtttgcatttgttgctgatagttagtgagttttttgtttaactggttaattttacgttgaagcgcattaatttgacgttcggtttttttgttgtgcgcattaatgcgcttggtttcttgacgtaaggtggtagcgtgaacggtagttggttgttgcaaaagggttccgacaccagcaagtgaaattgttaccaccacgcgacttatcaaacgggttgctttcattggctaatcctcccatccgcaaagggtatagccttctgcttgtgcttgtgacaatggcatggttgtagtactgttggcacgacttaagccacggcaattgggatcaagatggtattttttaccagaattaggggcaattgtcaccatttgttcaacttgttgagcactagcagcttgttgtgcttgttggcttgcctgaattgcagcctgttgctgagcggcctcgctagcttgactagtagcggcgattgaggctgaagccgcacggactctttctgactcagacgctttttgctgctttttaacaagtcgtgattgactggcaacttgttttgtcagttggctagcctctgttttctttgtagctagttgtttttttaaagcgctcgagttagcacgggccgccttgttttcgcgtacatcaacttgatgttggctggtcttcttggaattcgcagcagccaccggcattaatgaaccgcctaagccgattaaggcgatgatgataatcagtacgcgacgccattttctgggtcgttgccggttaaagaatagtagtgaaatcagtgcgctccccaagaacgctaaaaataaataggacataataacctccaaagtaatgaataacagttcttaacgattgtatattgtacataatatgaaagcaattataaaaagcctaggcgtacctaggcttttagcggttaatctttggttgtgagtgaaacaattgcttttgtttgatagtatttttcaggattggtttcaaaagttaaccaatctgcatcagcgaatagaccagccaatgcaagaattgggcgttctttagcgagttgttgttcgctagaagttgcaatggcgtcttggtagctaccattgaagatttcatctagataaaaggcttgatcatcaccaacgtttaaataggtagtatcattcttccaagcatgtagcaaatccatttccgaaaaagtaacggtttcgttatttgaaaaagtcatgataaattgcatatgggtcaactccaatcaattaattaagcaacaatctatttggttgcctgcctaaattatagcatttagataataaaaggcgaaccttttgacagtcattgtggttaaaaagtagaatgaaggtgaacaaaatagaaaggaagtcattgatatggcaaacgaagaacgattagatagtttgaaaaatgtaattgaaggcacagttaagaaggttgtcagtgaagtgacacctaataaagataagaaagaaaaggcgcaaaaagctgacaaaaaataggacttagtaatgaagtaaaggtcaaaatcatccgtttggttttggcttttttattggaaagccgttaaatgcgttcgcttttacgaggcaggcttggtataatttaaaggatagtcagaggaagtaggtacaattaatggattacgcaggaatgttagaccggcaaaagcacattcgtaatttttcgatcatcgcgcatattgatcatggtaaatcaacattagctgatcggattctcgagatgacggatactattgccaagcgcgatatgcaagcgcaagtcttagatgacatggaattagaacgtgaacgtgggattaccatcaagttaaacgcggtggaattacactaccatgccaaagatggcgaaacttatattttccatttaatcgatacacctggacacgtcgatttttcatacgaagtgtcacgaagtttggcagcttgcgaaggcgccttattagtcgtcgatgcggcccaaggggttgaagcacaaacgttagccaacgtttatttagcggtcgacgatgatttagaaatcgtccctgtcattaataaaatcgatttaccatctgcacaaccagacgttgttaaagcagaaatcgaagagatgattggtttggatgcttcagaagccgtgcttgctagtgctaagagcgggattgggattgaagaaatcctagaaaaactggtaacggacgtgccagcaccaacgggtgatttaaaagcaccattgaaggcgctgatttttgattcgatctacgatagttatcggggtgttgtgttaaacgtgcgggtttttgatggcactgttaaagtcggcgataagattcgcttgatgaataacgggaaagaattcgaagtcactgaagtcggtgtgatgtcgcctaaagccgttaaacgcgacttcttaatggttggtgatgtgggttatattacggccagcatcaagaccattcaagatacgcgggttggggatacggtcacccttgctgacaatccggcagcagaagcccttgatggttatcggcatattcaaccaatggtttattctgggatgtatcccgtggataacgcgaagtttaacgacttgcgtgaagcccttgaaaaattacaattaaatgatgccgcgttggaattcgaacctgaatcgtcacaagcattgggctttgggttccgttgtggcttcttaggcctcttgcatatggatgtcgtacaagaacggcttgaacgggaattcaatcttgacctgatcatgaccgcaccatcagtggattatcatgtcgatttaaccgacggcacagaagaagtgattgataacccaacagaaatgccagaaacatcaaatatttcagaagttaaagaaccgtacgttaaagcatctatcatggtaccgaacgattatgtgggggctgtgatggaacttgcacaacgtaaacgcggcgaattcgtcacgatggattacttagatacctatcgggttaatgtcatctacaacatgccactgtctgaaatcattttcgatttcttcgatgacttgaagtccaataccaagggttatgcctcattcgattatgaagtgactggctatcgtgcgagtgatctggtgaagatggatattctattgaacggtgaatccgttgatgccttgagttttatcgtgcaccgtgactttgcctttgaacgaggcaaagcgattgttggtaagttgaaagaaaccattccacgtcaacaattcgaagtgccgattcaagcagctatcgggaataaagtgattgcccgttcaacagtcaaggcctaccggaaaaacgtgctcgccaagtgttatggtggggatattacccggaagcgtaagttgttagaaaaacaaaaagccggtaagaaacggatgaaatccgtgggttcggtggaagtcccacaagaggcgttcatgtccattttgaagatgaatgatgaagataaagccggtaaataaggattcttaaaaatttaatagtgataaaatagcagttttgccaacattttgccaacgtcaattttcgttggttggcaaaactgctatttttttgtgtttcgaattattcaagatagtgctcttgccaacattactcgttctgaatttgttcgatcagactaactgtatttttgcgcattttatgagtgacatgagaataagtgtccattgtcgtgctgattcgagaatggcctaaacgttcactaacgactttcattttttctccggcttctagcagcatagtagcgtgagtgtgacgtagtgaatggaaattaaaattcttatgcaatttgtcttggactaattgcgccttatatttaatcgagttaggaaggacgggggtaccattttcttcggtgcacacaaagttactatacgcaaaaaagtagggaccattttccaaaagtgccttaatttccggtgtttctggcgttttaaattccaagatcataatggtgacaataatcgcgatgacagcatcgctaaatgcttctaatcgacccttattcattctatacatccccttaaccaaaatagctaattttatattttacactatttaattatgatgtgctattatttatagaatgcctgatgtaccagtgcattcaacaactaatccccaacaatcctttcaaagatacttaaaaataaattgatttcagccattaattaatagtataatttatctacgtagtaagggaggaattatcatggaaagagagtatcaatcacgcgcttcacttaaaaaagaagttaagtcattatttgctggtcattggggaaaggccgttacgttgaacatcatccccactctgctatcaattattggggtgattattgtcggagcagtcttgatggtcatgattgccatcttcgcaaacaccgacccatcaatggctgccaatgaatctttttcgggccattcgtctggtagtagttttgctggtcaaattccaagtttcattttggggctcattacacttgggattaattttactttcttagattggctccgttcgaaagatgctgattttagttcactcaaaggagctttcagtgtcttctcaaaacgttatttcttgggcgcttttctaattcgaattttagctagcttatttacattcctttgggcattgttattcattattccggggatcattaaaggctacgcttattctcaagcttcgtatatcttcaaggacttaacagataacgatccacaagctgacgttagctttttagattgtatcactaagagtcgtgagttaatgaatgggcataaattccggtttttcgtcttacaactaagcttcttaggttgggatattttagctggcctctcacttggcattggctatttctggttaacgccatataagaatgcaacttatatggcattctacaaagatcttgcaggcgatcaatttttacagacaacttctgcagatgaaccaactgaagaagttactgttgaagcaatttaaatgaactcaagacgttcttaattgggcgtctttttttgtattatgcggtgattagcagtaggcttagactaaccattttattcagaaaggatgacgtcatcatgaccactaatcaccaaatccaacttgataccgaacataattggcacgcagtgtctagtgaaatccctacgcctaaacctgaagagctactgatcaaagtcagggcaagtagcgtcaaccctgtcgaccttaaaagacgagctagcaccacaaccattttaggctatgacgggtatggtaccgtgcaagcggtcggcgccactgtgaccaactttcaacctggcgatgttgtcttctatgccggcagtacccagatcgatggcagtttccaacactatcaatgtgttccggccgcgatttgtgcgcttgcgcctagtacaatcagtgccgcggagattgccggcttaccgcttgtttcgttaaccgcctatgaattactttttgaaaagcttggttttaccgctgaacaaaatgccaatcgtggcaaacaactattgattatcaatggtgccggtggggttggatcaattctcagtcaactcgccaagtgggccggattcaccgtcactgccacaagcagtctcactcatttcgactggctaaaaacaaacggagttgatcacccgctggattatcattcacctagcagcttagacaacttagccagtcttccggataacacctttgatgccatcgcggtcctttatgatattgaaagctatctccaagaggtcgcacggctgattaaaccgtttggacaagtcggtacgattgttggcaatacgcatccacttgatctcgcaccgcttaagcctaaatcagcctcattttcatttgagtacatgttcactaaaacggactatcaattccaaaccactagtcaaggggcgattctccaacaaattgcgcggctaatcgatgcgcggattctgcatccaatcaccaccgcccactacacaggcttaacggtcgctaatctccaaatgattactgataaactgttaactggccatactactggtaaacagggattggtctactaaacgcaaaaaagccgcaaccaaattggttgcggcttttttaacacaacagtcatcgagttgcggggattgaacccacatcaatcattcattttacgcttcgcttttaatagccaatcgcttttgattttcttgggaggaatttcaatttagatgattggttctaccgttaaactataactcattgggtgttgctaagacacttctttagggaggaattgtctcataaaattaacttgctcagattcacttacttgggagatgcttatctgatatttatagaataccaagcagttgggaccaaattgtgaactttcaagtatgaaatgatgtccgttaaaaaaagcccccaccactttggtgagggctcaattttatagctcatcttccgtcgcgaacaaaccatacttcactttaaagcgactgatgattcggtaccacgactgataaaagaagaaaataaaaaagacatttgataaagcatgggccaagtcaaaatagaaactcgcgacataggctgcaataaaagtcttaatcgtcagtggattgacgtatgcgacaaaataccacatattcataatccacccaaaaataaagccccagacaaacccaaaaatacagagcaagtatttattctgtgcccactgatggcgactaattaagcctgccgtaacgcccatcatgccccagcaaaacatttgccatggggtccatggcccttgtcccaaaaacatattcgagacaatcgcggcggtcgaaccgacaataaaacccgattctggaccaaggactaatgccgacacgataatcacaaaactagttggctgaacactgggcaatggtgcaaatggtacccgagtgactgccgcaatcgccgctaaaaccgcgatgaaaataatttcacgggcgcgaatatcccgggtttcaaaccgccaataaaatggcagcatactggcaatcaaacagataaaactgaagattagaaaatgctgtccttttaaagtgacgataaacaacatgaaaatcgccataatcaagaaagccaatccaaacgtggtccaactattccttaaagctttcatgcgtgcacctcttcccaattcagggcttcgggcaattgactgcgtaacattcggttgatggttgtcgtatagaagaagttatgcgcgaaaaaggcataaggttcttcctccgatacaatcgtcccatcgaataataaggcacactgactagcaagccgggcactaaaggccatatcgtgacttgccataatcaacgttaagccttccgcttgtaaacgcgttaacaattcacccaacgcccgtttgcgaatcggatcaaggccctttgttggctcatccagtaagagtaactgcggctgcgctagcaatacaatcccgagtgcaatcaattgttgctcgccgccactggcatcttgcgggttacgttcagcaagggtttgaagaccgagctttgctagcatctcttctgccacttgttctggtgttgcgcgttttaactgccgcgcccgttcgataaattcttgacggacactatcataactgaaatgatcgctcggtgtttgtgagagataacccactgttttgaaaagttcagcttgcgcccacttaccgatcttcttcccctgtaacttgattgcaccatggcgcggttgtaataaaccaatcaaaagcttcaacaacgtcgatttaccagtcccatttttaccaacaatcgctaaccaatcgccggtatgaacctctagattgagctggtctaaaacataagggtcatttttttcatactgaaaactcacatgtttggcctgcagaattgttgcttggtcgttcgtggctatttcacgtttagtatgtgttaactgccattgtcgccgctcaatcaattgcttgccactgacaacggtcaatggtaatgccgcaatatcagctggtgcaatcaactcattttgtaaaaagacgtgtggcacatctgggacgaattcacgcaatgccggttgcgcccaaattgctgctaatccaccagcaaccggtccttgatacgttatctcaccgccatccatcaaccaaagttgattagagagcggtaaaatatcatccaactggtgttcactgataatcacggtgatgccgagttcgtcatgtacccgttgcaataaactaataaattctttggtcgcaatgggatcgagttgcgctgttggttcatccaacagtaaaagatccggctgtaaaatcaaaaccgacgctaggttgaccagttgtttttgaccacccgataaatcatgcacggaagcatacagcaaatcttggaaacctaaaaagctgactaattcggcaattcgtttttgaatattcgcactcttttcaccaatattctcgagtgaaaaagcgagttcctgaatgaccgtatccatcactaattggttatccggattttgaaagaccatcccaatcttctgcgcacttaacccttgcgataaatcagctaacggttggccctcgaaaataatctcacccgaccgtttaccaacgggccagagttcttttttgagttggcgcaataaggtggtcttcccgctacccgagttcccagctaacgtaatgaagtcacccgtctgaacggttaaattgatgtctttcagattttgttgggttgccaatgcatactgaaaattaaattgttttatttgcgcaatgtccaccataaatattcccatccttctagtaatagcggcaaactatcaattaataagactaacaccaaacatagccaaccaatttgattcaaatgaatcgagccaagtattggataaatcgctaagcggccaatcccctgtttagcaaaataaaaacaaagcgcactgcctgctacaagacttgccaatacccaaccatcccgttgggtaaatcgataacgttgataactcgttcgcttctgtgacccataaccacgggccgtcattgaatcagccgtttgtagtgcgtcaaccaatgaattaatcaataatacttccatcaaacgcatcccggcatgtgatcgggctctaacactccccgtttccatctgcacaccacgtgttctttggacattcttgatattggtaaaccgccgaataaatagtgggacaaaccgcatcgtaatcatcgttaataaagttagttgcggtgaaatccgcacaaataaatataagaacttatgattcgtcatactctgattataggaaacaaacactagcattaagatcgccagcgaaagcgccattaaaaaaccgtacgtgacagcctctgctgtgatcaccgtcccaccaaacgtcgtaatcacgtgcgccccatgattattcataatagggttcatcacgacgataaagagcatcatgaacaatgcaccctgcaatgtccccagtgttttcttctggtttttcgcaagcaagttcactgcaatcatcatcaacaattcacttacaagaaaaatcggatgaataaaaaccattgagaacgcaattgcaatcacgtaatacgcaaagatgacgattggatttaattgatcaaagaccagttgcgattttaaccctgaggcgcgttgcgatcgttcccgagattttccgtatacatccaatcaatcacatctccactcttaacaggataattaccacaagaatagttaggaaaactgccattcactcgataaagccatccgcttaacggtcctttatcaaattcgaatagcccattaatgcctttgatatagacgccgccgcccgtcccacgataggatagtgccatcccgcgactttgcaaatcacgttttaaaacataaatcaccatatccccatccttgatttcaacttgatcaccgttcaaccatttcggattaccttcactaattggtccataaacattgacgctcaccttttcaaggactggttggggcgtcgtagtgggcggtgtaactggtttactttcagttgattgtgacgattgattaatggcggattgggtcgatgccgattggactgccgagccttgttctacagcttgttgcgatgctaattgtttgctagaggccgatttttgtgatgattcatttgtctgttcagattgactgctggacttgcgcgtttcagctgttttccgactttcagataccgccctactatgtgactcagaggccttagatttaaccttaccatctaaaccaacagttgctggcttgacccgtttttttgatctatgttcctctttaacatgttgactacgcgtagacggattatcttgagccacactttgataggtaccgtatccgatgccgcttaaaataactaaactaccgataatcgcaatgattctctttttagacatatctaactcctaacgatgttcaacttgacgcttgaaccaaatgccaataatcccagtcaaaagtatcaagccggctacagaagcaactactgttgagttaacacctgtttgtggtaattgcttttgctttatttgagcatgatcttgattgtctgcttggtgtttattttctttttcaaccgtagtcacttgtcgttcaaacttgaaactgattgtattattcgctgcattaatcgtgatggatttggttggcgtgtcttttaattgataaccctcaactgcaacatcagatgcattaatcaacattgtgcgtccaactctttgatgctgcaattgaattgttttaaacactttgccgttttgatcgactgcttgcaccgtaacgtcagcaaactgcgctgcaggaattgtcccaatcatttgtttccgatactggaacgtcacggtcgttcccgttttagcaacttgaacagtttgttgtgcattgcctaataattcataaccctcaactgcgacttgattagcattcaccgtaatggtttgaccaacgggttgttcagctaattgaagactctttaaaatttgtcccttttcatcaactgcttgggcctttaccgatgctttttcaataactggcgttttaaaatcataaattgagccttttcccgcttggaacaaccggtattgggctaacgtataaacggcttgttcagttgacatcgctagcgatcccatatcgttattaatattccagcggaactgtccatctgctctttgataagcgaccagccgtgaaatcgggttagcgccttgatcgccaacaaatgttgtgactggatcaactccagctgcaattaagcccatgacaaccattgccgtactatttgagttttcttctgtcatataaacactagggattaaaaaaccacccgtttgtgcaacaaatgttttttctttcaacatcgttaccgctttatctagcgcatcttgaacgcctgggaagtcacgatgcatccccaacgccgtcatcgtcatcccggtcgtatctaaatcacttttactaccgaaaaaagcccagccattttcagcgttttgtgcttgtaaaaccgttggaattaaactatcaatcgcttgctgtgccttggcaccataatcacgcatgctaagggcgatgatgccgtaaacttgcccgttgatcccaccagttggtgctttttcaataattttatcaattatatttaaaccagcgaagttggttgcatcttcaccaagtgctgttaccccaattaccaacacttctaaatcggttgccgaaaaacgttgatcagcgagcattgattgtgcatccgcaaccaaggcattatgataactcaagcgttgcgctgcactcagtgtcacgcctgattgaatagctgctaacgctgaccatgcatctggttggccattattcaacaactgttgcgccccagccaccattgctttttgataatccgtactagatgcagtacgtggtgtcacttgtgtaacctttgtctcactcgcagacaccgtttgtgcactaccaataactgaaacaacaggcattattaacattaatcctgtccataataaggtaaaaaattgttgtcgcttcttcatttaactctcctcattccgattaactttgataccctataatttaccatatttaggagctagaaagttggccctataaggttaatcttcacaaatacgccttaaaaaaaacttcatttcaaacacaatttattcatatttcccgcctaaactaatatttattcagttttaaggaggaaatacttatgaattttatcaagcgtgcttggcaaaacgtcatctttaaaaaagggcgtagcttcttattaataattgtgatgaccgtcatcatgatttttatcatggctggtctattgattagaaatgcagccattacaaccgtcaacaataccaaacaacaggtgggcgctagcgtcaccctttctgcaaatcgcgatcaagcgtttaagaaaatgcgcgcctcggctagcagtgatgccccaagtactacagcaacgcgccctaaattaaccatgccctccgtcaaattaaaagacgtaacggctatttcgaaattatccgggctggcaaattataacgtcagcgtcacgacttctgcgaacgcctcgtccattgaagccattacgacatcaagtagttcaaataatagtggtggcatgatgggcggcggctctggcggcaacgctgagtcatccacttcaacaggtgacttacaaatcaccggagtgctcaataccgcaaccctcagcgactttaaagataatacaagtaaaatcacgaaaggtcgcgctttaaatagtagcgacaaaaacactaataatgtcgtcatcgaatccgaattggctaaagaaaacagcctcaaagtcggcgacaccattaaagtcaaagccagcacgacaggcaaaaaagcctatacgctaaaagtagtcgggatctataaggctagtcaaagtagcgctggcatgggtccacaacaaacagaccccgcaaacgtcatctatacggcatacacattagctaaccaaattaaaggtcaaactggcaaagtggatagtgccacattcacgcttagtgacccaactaagaaaaatagttttgtaaaagcagcgaagaagattatcaatacgaagaaattcacggtaacagctgatgacagtacttaccaatcactcaaacaatccatgcagaaaatggctagttttgctaataagattgtttggttagtcgctatcgctggcactgttatcctcgcattaattattatcttaatggttcgcgaacggcgttatgaaatgggcgttttactctcattaggtgaaaagcgcgtcaaaatcgtgggccaattattagttgaaatgttcatgctgctgattgtcagtttagctttagccggcattggcggacgattcgctggtcaagcgcttagcaaacaagttatgcgttccgtcacaaccgaaacgacaaccagctcacaaacaaataacatgcaacctggcggtaacggcggccctggtggcggtcaagcccctagtggccaaactggtggcaatcggccaagtggtcaaatgcaacaacctggccaatctgctaaaaaagccgtcaaagcaagcgaccttgatctgaagattagtgccgtcaccttaatgcaacttggcgcattcggcttcaccatcatcgcatttgccgtcttactcgcatcactcaatattttacgactcgagccacgcaaaattctcattggataattataggaggtccactatgttaacagctaaaaacatcagttactggtacgatactgaagaaaatacactttacaaagatgttaatctcgattttgaagccggcaaactctacggcatcatcggtagcagtggtgctggaaaaacgaccttactcaccatgctttcagggttagataaaccgcgccgcgggagtattttatacgaaggtaccgatatccaaaaaatcggcttaacccaataccgcaatcgctatgtgtccatcgtgtttcaagcctacaacttactcccctacatgtcggcactcgacaacgtcttgactgcgatggccattactcattcgacgcatgacaatgctgccgatttcgcactcgaaatgctcagcaaggttggcatcaatcccgaactcgcccataagaacgtacaaaaactatcaggtggccagcaacaacgcgttgcgatcgtgcgcgccatgtgttgttcagcccccatcgttgttgccgacgaaccaaccggtaacttagatgaacaaaatacgcaggagatcattcatctcttccaagaattagcccatcaacaacaaaaatgtgtgattcttgtcacccatgaaaaagaagtcgcagcaagttgtgatgttcagtatcatcttcaaaataaaacctttcaaccagttgcttaactaagtaaaaaacgactgagcctgtttacggcttggtcgttttttaacgggcatgctatactgagggcaatcaaaaggagggcttctaaatgctaacaatcttctatggttcttttagccatgctggccattcatttattattgcagcaacccccaaaggtatctgttttgttggttcacccgatggcactatcagtgaattaaccacttttcttccccaaacgaaattagttgcaaatcaagccgcaatcgctccttatagtgaatcattaacagcttatctcgatggtgaccaagccacgtggtcactgccaattgatattatcggcggcacaccttttcaaagaagtgtttggaccgccctgcaagctgtgccatatgatcaaaccacaacttacagcgctttggcggctcaagtcgggcaccccaccgcaattcgcgcagtggcttctgccattggtcgcaatccactattgatgattattccttgccatcgcgtctaccgtaaagacgggcaaattggggggtatcgtggcggacttgaattgaaacaaaccctccaccagcttgaaactcaaaccaaataaggggattaatttgaaattttgtcaataaaagtctatacttattattaagtcggtggtagaatgtacggttactctactcctttcaaattaagaaaaagagatgattattacgcaagtaactgatgtttatgggttaacccacgaaaactgcaagctgatcgaaactgaaaatgattttactcgcatcttcctagctgaaggtcctgatggtacacgttatacgtgtttactacctgatgcgaaacccaatccaaagtcaaaccaacactttgaatatggtaatccagcagatgcaccatactagatactaaaaaagcgccaacggatattagaatccgttgacgcttttttgttgaaacgtgttctcgccagcatatttctgcacttaaccaaatttaccaaatcagcgattacatcgccaatttggtaaatccagtcaatgctcagcactctattctgccattaatatatccaagaattgttcgccgtatttttctagtttattttcgccgacccctttgacatctagcatttcagtcaaggaagttggcatgatttcacacattgaatatagggtcttatccgagaaaatcacaaacggaggcacaccttgttcttccgctaaatcgcggcgtaactcacgtagttgttcaaataattcattatcttcaggcaacgttttttgcactttgaccgccatcttgcgcgtcactttcgcttggccttttaagactgcaactcccgccgccgtgatttgcagcactgggtattgaccgccagaagcttgcaaatatcctgaagcgactaagtaatcgatcaaaccactgatttctttttgcgaatcaccacgcattagaccatacgttgggagttcatcaaagcggaattgcatgattttttgattcttcgagcccgtcaatacttgcgccaccaacactttgccaaaccgttcatccatccgtttaacgcacgataagactttttgtacatcaatcgtgatgtcttgttcttcacgcgtatccagacagttactgcaccggccgcacgcttcacaatcatcatcaaaataattgacgatgtactgttgcaaacattgctgcgtattggcgtactgcgtcatttcttgcaacttggcatattcttgttgcttatgcgcttcgtccatttccgactgatcgataaagaaatgctgaatctgcacatcattcactttaaataatagaatcgcttcactcggcaagccatcacgcccggcccggccagcttcttgatagtaagcctctaaactcccaggaatctgggcatgcacgacaaagcgcacattacttttatcaatgcccatgccaaacgcattagtcgcgaccattatcggtttgcgatcatagagaaaatcctcttgattctgacgacgcaccgcttcgtttaatccgccatgatacattgtcacatctaacttagccttttcaatcagcttcgtgagccgttcaacttctttccgtgtgctggcgtaaataatcccggatttttgtttgttgacctttaaataatcgattaagtagcgatcactattttgatttttaactacttgaaacgcaagattctgccgtgaaaaccccgtcttaacttcgtgctgaatgttcaaccgttgcatgatgtcagctgccacttgtgaggttgccgtagcggttaaagccacaatcgttggtcgttggcgcatactctgaatcgtatccgtcaggcgtagataacttggccgaaaatcgtggccccattgcgaaatacaatgcgcttcatcgaccgcaatcaaatcaatcgttaattcagctaaatcagctaaaaagtaatccgaatccaagcgttccggcgaaacatatagtaatttcacttcaccacgcgcagcttggttaaagcgttcttggacttccccctgcgttagcgtactattgataaacgtggctggaatcccattttcattaagcgcatcgacttgatccttcatcaaagaaatcaacggtgataccaccaacgttaaaccgggtagcatcaatgctggtatttgataacacaatgacttcccgccaccagttggcataatcgccaagacattagtgcctgccaacaatgattcgatcacatctgcttgaccttctctaaagtgatcataaccaaatttttcttttagtaccgcttgtgcttgcatgccatttctcccacccgttaaaattcctaccttctatcataacaaagattcgttaattccggttaattgaatctcagtttcaagcattccttcaatcaattcttactggctgacaaaaccagcgatttagtgtttaattagaagcatcaaagactgtcaggaggcttcctatgaccttggaaattaatgcaacattaacggctacccaaacgatcgtcgatttaatcgaacaacccgttactcagcttttaattgaacaaacaccggctaatacaaccgcattcgcacaccccgctttattcctcggttttgcgcagcaacaactgcaacaaattgaacaactctccccacttgaaacagcctcgactgatcaagttgacacgggtatctggattaccatggatcctgagtggactgaacaaattggctacgtagggcagctattagccgagcaaaatcaaccaccgataacgagcgcctcgcttccgtccaacgtctctcaaaatttccgaacaaccttagctccagccgttgaagccatcatcttggtcctcagccgctttggttatcccctgaccaaaagcgcaccagtcaaagcaaaaccggctaaaacacgtcatcgatggacaaaagccatcagccaaatcgaattcactgttgccacgcgcgaagcacaaggaacagccatctggcaaaagcgcaacgagatgttattgaaagcaggggcacaattgcggccaaccgcgccacttaataaggatggctcgtttggctttgctgctaaaatgggcactcacttgcgcaacgaacatgcagcgcaaattcaagacaatcaaacgactgaagacattattttcaagagcgtgaatgaaatcggcctcttcttgtactttggtggcaccaatagttggctcgaactatgcgacacaaatggtcgctcaattgacgactggactaaaatctaaaatagaaaagagattcaacatgcaaattatcagttctggcattcatcacggctacttcgacgacctctacggcggtcatggcactcaatttaacgcggaaggtgtgccaacttattccattccgtttaacattcaagacgcacctagcgatacagtcagttatgctgccgttttctacgatctagatgcctacgaagtgacgcaagggtttccttggattcactggacacttgccaatttaaaaacgaccactgtcgcggctaatgctagccaacaagcgcccgatttcatccaaggtgttaatacttggcacagtcccaaaacagaccatttatcaacagaagcaagtgcttgctacggcgggatgacaccccctaaccgcgatcacacttatacacttaaagtatttgcacttgataccacgctcgatttacagcctggcttttacctaaatcaaatgacagcggcaatgcgcggtcacatcttagatagcgctattttagaagcacaataccgccaatttaaacattaggtgacaatggccttaactcggctaacacttttgtcatctgatcttaaaatcgtcgcttttttacgcttaacatcgtatgataactttatcaattcggaataaggagttctcattcaatgaaaaaaaacaattagcattattgcgataatcgccctcatcatcgtcggatttgctggctaccgttaatacaaaaatacgtatgtcggcgaagtaggctacgccaaagttgctgctcaatctccagctaaagaagccaccaaagatgattcaggtaaaacagtgactaatatgtatagctatcactaccaactaaatgtggtgaaagaagatggtagccaccaagtggtccctgtcgaagttactggcgaaaatccaacgccactcactcccaacagctatgtcaaagttgaatttaattcaaaacgcgtcttaaaagggcctaatactgtgtccaagaatcaaattccggctaaagttctggcgggtttagataaataataaattagcttatcctagtaccattaatacttgttattagctgttaccctcttaaattaagttattaaaaagcagtacccttgattagttatcatgggtgctgctttttgtatgtttcctgtgaaacattttgttttgtttgattttctttaaggcttcacgttgggcgaagattgttagttcgtgttcttcaacaaacgtcatcacccactcaggattttccttactatagttacgtaaagcccagccaattgctttttggataaagaactcatctgtgtcaatatctgccagaatggcttcttccaaaaacgccacattcgttttttcgtaaaaactgagttgtagcgtaatcgcaatccggcgcagccagaaattctcagcacctataaaatgctgtgcaacccaatcaaactgttcaggatgcagtctgatgtactctccaaatacttttcgccaagcatcgatgctgtcccaccaaactttttccaacaccaacgttaataaatgttccatatcagccggttcccaccaacgtactgaacgcaatgccatctcgatggcaacatattgatactcacgcgttggttgagcatataaagtctcaatgaactgcattatttctgctggtgacaattgtttcacagactgccacaattcgcgttcaattaaatggcggtccggtgctttaacaccgttaaattcaaattgactctgcatgtatttcttcattgccgcctgattttctggatatatcggtaattcaaaatccatggttatccctccactatatcgcctctaaaaaacttgtgccgtttgtttagctgtttcaatagcttcctgcataatcacgttagctttttctggcgaataatcaattccttcgatactaattttaatgacttcgtcaacaccggcaaagccaagaattgttttaacgtattgtgttgcaaaatcttggccagcataaacgcttccggctgactgaatatgaactgcttttttcccagttactaagggctgcggagctgtttcagtatgtctaaatgtttttccagccaccatcactgtgtcaatccacgctttaagtttcgtcggtacatttaaattccaaagcggattagcaatcacaaacttatcggttgctaagaactggtcggtatagcgattaaaccgagcgaccttctcttgctgactagcgcttaaggtggccatagcttgcccttttttaacgccgcccatgccgtcattagttcttgatcaatttctggtaagtcagattggtacaagtccaaccaactgatttcatcagctggattttgtttttgataaacttgcatgaactgcgccaaaatcgttaacgtccgtgactattctgtagcaagtggatgcgccttaacaactaatactttactcattaatttccgccccttagtatttaaactttatacactatcgttttagtatactatctgcggcgttgtccataagctttacatcatttaataaaccaaccacctattaatgaccttttacaacgttttatacagcaacaaacaaccaaaaacgattaataagtcataaatataccgcaccatcgttcgactatcaattcgagtgctcacccaattgcccaacggaatcacaactaacaataatggtaagctaagtcccaatagttgcaatacttggatggtccaaaagcccgctaaaatatgactgattacaacgattgtcccaacacaaataaaatgggcctgtagaatgccccttaacgatgctactggccatttttttaatgtcccataaatcaccactggcacaccatgactattgtaggcactgcccatcacgcctgatattatcccagctaaataatcccaatgatgtgactgtaaatgttgctgctgcacgtgatgtcggtgtaactgatagcgattatagctgtcataaaggattaaaaacccagctaacgttctcaacacaatcgtcgttggcacatacgtcatcagcgctatcccgactggcacacccaataatgaaccaatcactagtcgcctgacaaccgctatatcaatctgttggcggtggcgaatcactgccggaatcgccacaattagtcccagcgcgccaatcaaagccgttgccgcttttttaaatcaatcgctactagggccaataatggcatcgttactaatgcctcaccaaacccaaaaaccgttctggtaaaagcgcccaacgcaacgatcaaaagaatcataattatcgtcatccaaaaatccttcctaaaccgttttgttccacacaaccttttcaaactgcgtgccattactttttagtacggataaacttgcattagcaaccattttttgtgatcgaatttcctcaaacggaatccctagtagtgtgttgataacaaacaataaaataatcccatgcgcaacaactaatacatcaccatcaggatacgtcgtttgagcagtcttaatcgcgagcatcccacgttctaagaccgcctggtaggactccgcgtgaatctgtttggcatcaaacagctctggatgatggaagtaattttcatattgtggatggttcgtcaaactagcaccaggttggccttcccaatcaccaagtgccatttcttttaaatcatccacgaccatgattgccggttgtgattgattagtctgcgacactatcgcatccattgtttcaacggcacgtgttaatggtgacgtcagtaacgcatcaaaagactggtccgctaataaactacctagtcgtttagcagccgcttgccccgcctcagttaatgttgaattcgtcccaccaccattgaaacactgtactcgattaaccatcgtttcaccatgccgtacaaaataaaaagttgtcatgttgatcccgcctttataggatctatcatactataaaatgcaaaaaaagacgcagttcaaattgaactgcgccttcattgagcctcgttttatttaccttccgacgtgttttctgccacgacttggtcataggcctttgtaccagcatagacttcgtcagttaggatgttgcgtttatacttcatgacacgataaatgtggagaattaagactgccacattaatgaccagtgctaaaccactgattgtcatcaaagcagcactactgtgcgtaccttgcactgaaaattgtgaatccgttacaaaagcgggataactcattgtaaacatcatccaaaaagccaatgtttgcgcacgtgcttggagccagctcccttttttaaccaggaatgctgctaatgtacatgaaattaataatgcagcgcccgcatagaatgagtgatcaccaacacaattgtaaacataggcgaagttccaaacatcataggcgataatccaaggccagatttgatcgggccagatcatgtctttttgtttgtcatgactgataataatgccgaaccagcctgagattgtgatgatgttaataattccggcaatcccgttcatgatattccacgcgccaccattcatgatcacaccgtcgactaagccatgtaggtgtgaaacttgaaaatcacgaatcacagcttccataatattaaacgctaaaattgcgggtgggaaaatcaatgcccacttgttgtgttgtaacttagggataaagcgcagcgccataaaccctaaacaacctgctaatgctgagtacactttaacccagtggaaccaagtcccggtactgctaccaggaccagccgtcgttggccaaacaaagagcgttaaaacgactggtaacccaacaaagagaattaatccaatccacttgttagcccgagctgcttcatttaaaaccattaatgcaataaccactagtccccaaactagccaatccattcctgaaatattttgaaataaaaacatatcagtcacctccaaagaaataattgctaattacattcttactttaactgcaagctggcggtttctgtatggtcaattcaggataaatgtccaaatctaatgattattttgtaaaacatggttcacagtaccatttaacatgcgatgcatgcgctgataaaattcctctttagattcttgtagatttgttacaagccattgcgtaatctgtgtcgccaatgcccaaccataaaattggcaatttcatctcggaaagtcgctggacaatccacctttaaatcttgaacaacccctgcaaccatgttaaaagcaactcgatacaaaaaacgacttagtaaatctcgattaagtgaatgaaacgtatttaaacagaaatgccgattgttttcaatataagttaccaagacacctagaccgacgacccaatcccgttcacgttgatacactgccagttgcgtaacaatttcacgattataaatccaagcaaccaactcattaatatcggcgaaatggtaataaaacgtattgcgcgcaacgtcagcactgctcgtcaattgattgaccgtaatgtgatcgaccggagttgttttcatcaattcttttaaggtatctgctagcttttgcttggtatccatcgtattgccctccaaaaattatctatgattagcatcccatagatagttccgaactgcaatcactaacccgatttgcactccaggataaattgttctatcgttagagagtacaattaacggaggcgacttataatatgcacgaaactgacgacgcttttagggcgatgaccaatggggaatggtactttgattcagcggtcactattcaaaaacgggatgcagcccgccttgccttacaaaaggccagccaaatcttagataacgatgcacggatggccactatccaaaaattactcggtcataccggtagcgattttttcatcgaaaccggttttgaatttagcttcggtgaaaacattacgattggcgatcatttttacgccaatcgtaacgtcgttatttgtgacgaagcaccagtcaccattggtgactactgtaaatttggcccaggagtatcactcttaaccccttaccacccaattgaccccttagaacgtgcgacaaaaaaagaaatttctagtcccattactatcggcaatcacgtctggctcggtgcaaatgtcacaattctgccaggaatcacgctcggcaataacgttgtcgttggtgccggcagtgtcgtgaccaaatcctatccgggtaacgtaattttagttggtaatccagcacgggtattacggaaaattcccgctaaataatcaaaaaggactgacaaatgtcagtccttttttaggcttcaattgcataatattcaataatcgtttgtaaagcctccgctgcgcgttgatctccaattaacttagtgtagtatgctgtaaatcgttcatctgctacatacatggctgctaaaccgcggtgcattgctagactataccggggagtcgctgtttgtaaccacgtttgatgggcttcaaaggctgtttgcgccgcttctgatggcaattgcggctggtccaagtaagtttgtaatgccgtcttcaatcggtcttcagccgcctgcatcgttgcatattgggcctcacttagccctaaaaagtgctgatcggcttcttgcttggcttgtttcccatagttagtcgtcacttcttgcccgtagcgttgctcattttcagccactgcctgttgtttaaactgtttgaatttagtttgatctgtcatttgaattcctccggtttgattttgaagggtcgcatctagctgtgctaacgttgccgttagcgcagcttgttgtttaaccagttgttcccgctgatttgctaagcgttccagacgctcggccggtggtaacgccaacagctgctgaatctcagccagactaaactgtagttgacggtacattaagattaactgcagtcgatctgcatcctggctcgaatacgttcgataaccattactagcaaccgttggcaccagtaaaccgcgctcgtgataataacgtagcgtacgctcagaaaccccggtcaattcagcgaaagttttaatctgataatccatttgccttccctccttcaaaacccactataaggcctgacgtgacgtgaaggtcaagcattgttcgttagtgcctgattaatttctgtttaaccaagtaatcatgggccacatcgcgtgctttgcggtgtttgacctgtacttggtagttcatctcttgcatttggctctcagtaatctgacctgccaagcgattcaatgctttgacgacttccggatgcgccttggcaaagccggctttcataatcggtgccccttgataaggcgggaagaagtgacgatcatcttctaaaacaactagtttgtaccgtgcgacttccgcatcggttgtataaccatcgaccacatcgaccttgccgtccgcaatcgctttatagcgaatacttggctccataattttagcatttaaatttaattgataggtgtcctttaacccttgatacccatctttttggtgataaaaatcaggatcaaaaccggccgtaaatggttgattcaaagcggctaaatccgaaattgttttgacattatatttcttggcaaaggccgcagtaaccgccaagtcataaccgttttgatagcgcattggcggtaagtacgccatattgaactgttcttgtagcgatgtttttgcaagttgatacgttttagttggattctggtttgtcttagttggcgacttcaccaacgtctgtaaaaccgttcctgtgaattcaggataaatatcaatcttatcagccttcaaggcgttaaataagaatgtggtcccaccgaaattaggtttaaccgttactttgtagttaggctggtcttctaaaattagatcacgatacatattcatcaagatttcgggttcactacccaatttcccagcaatcgtgatggtggtctgcggcgcttgaaaccgtgtcattccttcgatcacaccgaaaaggccaacaaaaatggctaaactgactgtgatttttttaaaggataatgtccctaaccagcgaattaatgcactgaccactaacgctaaaaccgctgaaagtgtcgccccaaccaataatagtgcgttattatttgactgaatcccaacaagaataaacgtcccgaggccgcccgcaccaatcaaggccgccaaggtagctgtcccgataatcatcacgagtgcaatccgcaaacccgagataatcaacggcatcgcaagtggcagttcaatccgtagtagccgtttagcgcgcggcaacccgaaggctatttctgcctcttttaatgctggatcaattccgatcaaaccagtgtatgtattttgaaaaatcggcattaaggcataaagtactaacgtaatcacagccggaatcgtcccaattccgacaagcgggatcaataatcctaagagcgccaaagacggaattgtctgtaagacactcgtgacttgcagcattgcttcagctaatttctgatgagctgttaaaacaatcgccaacggaatcccgatagccgccgcaattaataacgccaataacgaaatctccaaatgttgcccaagtgcttgtagcaactcaccggattgggtcgttaaaatttgttcaatctgttgcatcatcgttatagcccccgtttcgcaatgagcgttgttaaatcggtcatcgtcaattgccgttgttcttgaccatcagtggcaactacgcccccatctggatggtctactaattgttgcgctaattcagctaatgttgcactggacgtaatcgttgtcggctgattattaacaacagttcctaaatcggccgccaataaatcttgaactgtcaacgatgcttgttggcgttcaatgtcaaaaaattcgcgaacaaattcattttttggttgattaaaaatcgcttttgctgtcccgacttgctgaatactgccttggcgcattaccgcaatttcatcacccaagcgcaacgcttctttcatatcgtgggtcacaaatacaattgtattatgcagctgcttttgtaaactcaaaacgagatcttgtaattgtgtacgggtcaccggatcaagcgcactaaagggttcatccatcaaaatcaccttagaactagttgctaacgcacgaataatcccaatccgctgctgctgtccccctgataattcgcttggataacggctagcatactgatccggatctaaatggaccatttccaaaagttcgcgtgcccgtttttgacgatcagctttggtccatttcaatacctctaattgaatggtaatattttcctcaattgtaagatgtggaaacaacgcaatgttttgtagaacgtaaccaatattgagccgtaacgtttggagatccatttgattgatgggttggccgtcaatcttaattgtgccactcgtgggttcaattaaccgattaatcattttaaccgttgttgtctttccgctaccactcggtccgaccaaaacaaatagaccattgtctggaatggttaacgtcaagccatctaatgctaagctttgttcatattgcttagtgacaccttcaaattcaatcatgtgctactcctttttccggttaacgatttgttaacttattgtaccacttagcaatcagcccaccaattgacgtgcttaaacacccaatccaatttttttgattcgctttgtgactatgctaagatgaacccgaattgaaatctgaggaggtcttaatatgcaaacacactttgatacaatcattattggtggcggtcctggcggcttagcggcggcttacagtctcgctgaacaacagtccgtcttagtcgttgaaaatgatttatggggcggcacttgccccaaccgtggctgtgatcctaaaaaaatgctttattcagctgtcgaagcactcgacaatcaacaagcgctccaaacaaatggcttagtcggaactagcgctattaactggtctgaactgatggcctttaagcgatcttatacgcaacaaatcccaactggtaccctcaacggtctacaacatgccggcatccaaaccgtcacgggcaccgcccacttcagtgatactcaaaccttgcagattaatggtgacacttacactgccgaccatttcatcattgcgaccggtcaaacaccaacgctccctacaatcgagggtcacgatttactacaaaccagtaatgaatttttagacctcgatcgtttaccagaaaaggttgcctttattggtggcgggtatatcgccattgaactggcaaatattgcagttactgctggtgcagaagtccatattattcaacataacgagcgtattttacgcgacttccctgaagttttaacacataaactcgtcaccagtcttcaggaaaaaggcattcactttcattttgacactgacgtcacaacaattacgcaaaccagcaatcagctaactctcagtaatcaagctaattttaaactgacagtcgacgccgcttttgccgcaatgggccgcaaacccaatatcgaccaactggcattggaaaaagctggggtaacagcgaaccagcatggcattcaagtcaatgaccatttaatgagtagtaatccccgcgtcttcgccattggtgacgtcgtagatcgtgtccaacccaaattaacaccagttgctggttttgaaggccgctatgtcgccaaccaactactcgctaaaaagacagcacccattacttacccactcattccacatacggtatatgcaagcccacaaatatcacaagtaggcgtttctgttgcaactgcacaagctgctcctagtcaataccgcattaatcaacaaaccgtcacaaattggtataccttcaatcgtattcaagaatccgacgcaatggtcatcaccatttttgacaatcaaactaaccaactcgtcggtgctgcggcttacaccacaattgctgaagaactcattaattactttaccaacctgattaaacatcagacaaccgcaacggaactcaccgataccatctataactacccaagcccggcgagtgatttaaaatattattattaaaaaaagtgttgagggccaacttactcacgaccttcaacactttttttaattttcttttttcgccttcatctgtaaccagatattaaacgcgagcacaatcaccaataggactgtcgcaatcagcatgatgttatgcaagccttggtacataatcgcgcgcatcgctggtaataagtgcgctggtaattcgtgaacgcgttggagattgcttaacttattcatcatcgccatcgtaatttgaccgtgcgattcggcaatgccgcgtgttaaggcatggtttaaaatcacaccgtaaatcgatgacatgaatgtttgactgagaattcgcaagagataggcaaacgacgtcgcaatgggaacatcacgttcttcggcatcttcttgaacactgatttgtaggacgttaaaactcatcccgagcccgaaaccttcaaaggcccccatcaacagtaagaaccaaaacgatgcttggtcgcccatcatcaacataccgctaaacgcaattaaaaacgcaactgttcccaatgtcacaacgcggtgtttacccaatttaggctgaattgcgggacccgccaatgagccaattaagttggtcaccgcacctggaatctgcgtcattccaccgagtagcgcacttaatccaagtagcccttgtgcccacattggaatatagatattaaacgcgataaatgcgccccataaaacaacaaataaaataaagtcggtcaccaattgcggatttttaaataagcggttcggtacaatcggatcaactgcccggtcttcaactctaaacaagacaactaataaagctaaaccagcaaataccaatcctaaaacgagtgctagcgaacccgtcccaatcatttgaatccccgtcaataaagtcaccaaactggtaatcataatcccagcacctaaataatcgacgtttccggtttgatgtgatttaagcgtttctttaaagaaataacgaacacaaacaattgatactagggcaattggtacattgatataaaagacccaatgccaactaaacgtatcgacaatccagccaccaattaggggacctacaattgaagccgcactataactcgcagtcgcataaccaatcacctgcgcgcgtttgcgtaaatttttgtataagtcggcatagataatgaatggtaaagtattcatcccgccagcaccgatgcccatcaccgttcgtgcaatcagaaagaagacgatattccccgaaaccgcctgaaaaatcgaaccaaccgcaaataataatgtcgccagctggtaagccccacgatttccaatccgttcgcctaatttactccataagggggtcgcaaccgccatccccaaaaggaaaaccgccacaatccagcccatatattgaatcccgtgtaaatcactgataatagcaggcaaagccgtgttgataattgtcccatcgagtcccgccattgtgttggataataataatgctaatgttaccaaaagtgtatttttcttactcacgattgcgtgctccatgtatttttcttttatatttattatagtataagttatttcgtttaacgagcttacttcagtataccaatcacttttaatatcataccttatcatatacattttcacacaaataaaaaagacgccctcctcaggacgtcctctaactttaatttaatgcgtcaaactgttcgactttttggcgagctttatcactccgccgcatccggataccatattccgttaaaccaatcacaacagcgactatcaagagaatcaataaactcttccaatcttgcttcaaaataagcaaatcgcccgcaaaggcgtagataaacgcgacaatcgttgaacccccaaagcacgccaggccctgtgctcggggggtgaggtgggtgtctccagccgccaagttgacaaaggccgtaggaatcatcggcactgcatagccaattaatacaccaagcgctggatgttgcatcttaattaatgcgcggtaaacacgcgaatccggctttttactgcgatgatttctgacacgggcaaataattggacttgcaacaagttcccgatcgtcaagccaatcgcattgaccacgaaaccaccccaatgacccaaacacgcgccaataatcaatgccaccgctgatgttggcgcacccggaattaaggtgaccccaatcattaacagaccaaacaccaagaaagcatacggccccagatgacgaatctcaagcacatattggcggtaattttgccattgatccaagaaagcaaaaacggcggtctggtgttgccatccaattagaagaatcactaatcctagtaaaatcacaccgcttgctagccaaagtcgtttccgttgtctcttcgtcatcagattcccctcatttctacttaacaaatagtcctagttcctctagtataaacaacctgcaaaggggacaacaagtttattttctattttgattcaattcgttcactaagcgcttattttgatagcgcgtgtagtaataaaaaataatcacgtgcattacgaatgttaataacgacgtccctaataaatacggtgaaacaacatcaaataacgttgtcgaatagagcctcaaagcgagtatttgaaacccaatattactaatagtactaatcaaaacattccacggcgcaccgaacgtcgaatagcgccataagtatgaataaatgacgccaaacacaacgccaatcaacacgcctaggctaactaatcgccaagcagccagcgcttcgccccgtgttagcgttgtgacaacagtgagccacataatcgccattaatgccacttgattaaagtctttgcggatttgcttcatcattttaaccactcctttatttgcttggcataataccgactaacaatatactgtcttccagattacgtatagaccaccaatcgcgcatttgaacccaccgcaaaattggcaacttgctgcagatttaaaatcgttgtgttattaattctcagaaaaccgttctgtgaaaacggggctaattgttttaaattactagggtagtaatagctattgccatcgattgtcgccaccttcgccaaatgtccaaaggccgtaaaactttcaattgccgttaatgatctgttttgtaatcgatctgttcgcgcatctcgcacctgaatcgattgatcaaaggttagcttcttaaaagcagattcaaccgttgcttgattctgtggttgactgtgaacgacaatcgtatcttgtgcacactttgaatcccaattaaatataattttcattaactcgcctcctctacaaacctaaagatagcagaagatctcgcttaattcgatgactatttgttttgttgcaagctgctctctcttgttgcatataaaaaagcctcattcaacaatgaggccttttatgcctatctctatttgtgatacggacttccttgattaatcataaacgcccggtaaatctgttctgtcaatactaagcgcatcaattggtggggtagtgtgagcttgccaaatgaaagtgcatcattggcgcgtttgttaaccgcatcgctagtcccgagtgacccgccgatgacaaatgtgatatctgatttaccataggtcgccaaatcttgaatttcctttgcgaattcttctgaggcacgttgtttgccttgaatcgccaggacaatcacatgttccttatctttaatcttgttgagaattcgttcgccttctttgtctttgacgttagtcatttcagcgtcacttaatgattcgggcgctttttcatccgcgacttcaatcatttcgaacttacagaacttactgagccgtttcgcatattccacgatccccgcttttaaatacttttcctttaatttaccaactgtgattactttaatgttcataaatagcctcctactgttacttacattttaggggaaaacaatgcagaaaaaaagctattcacagtaattcaccggaaagtactgcttatccacaaaagttgtccacatatgcacaagtgttcgtcccaaatatggtatctcgaatttttcttgatactaaataaccgacacctaaattttttcgttaaatttaataaaaaagttatccacccttttttgattgttcgttctcaaattatccggttacaaatccttttatatcagcgttattctggtgttataataattttaaaaaagttatccaccgcctgttaatttttttgtggataactaaaaagaccttttaaccgtgttatacccacaatccacagacttatccacagacgctcggatttcttcccaggttactatccacattgacatttttaaaacttaacattcctgccactttagtctgaatttaaccaaaataaaaaagccgtcaacatctaattgatgctggcggctttaatttattttgctgccgttgtactatctgttgatgctgcttcagtcaacttcactgttgatttcttcaattcaccattatgataatactgaatttcaaccgtactattcatatcgtaactgtaaagtgtcgtgtgtaaatcagcaacacttgtgacatccttgccacctaaaccaacaatgacgtcgtatttactaatccctgccttcttagcaactgagttggcattgactgatgcaacaactaccccactcttcacagaggttggtaatttcaagactgatgattgttgcgttgatgaaacattcgtcaaatcgatgacgctaatcccaagcgctggtcgaacaactttcccatttgcaaccaattggttaataattttgaccacttcgttacttggaatggcaaagcccatcccttcaaccgttgtgctcccgttagaagctaacttcattgaattgatcccgatgacttgtcctgcaaggttaactagcggaccacctgaattcccagggttaatcgctgtatcagtttgaataacggttgcttggccagtcgcttgaccggttgtttcatccgtcacatcaatcgtccgtttctttgctgaaataatcccttgggtaacagaagtagcatattctgagcctaaaggcgaaccaatcgcgagcactgattcaccaggtttaatgctgtcagaatcaccaaacgttgcggtcttcgtcactttggcactatcaatctttaaaacggctaaatcagaaacggcatccgttccgactaagctagcatcaatttttgtgccatcactaaggatgacttccaacttatctgagccagaaacaacgtgattgttcgtgacaatgtaggctttaccatctttcttttcgtagattaaacctgagccttcactcgattcttcaagctcactactactactttttttattggtactatccgcgccaaagagcgcactcaaatcgcctgaattatcttgttgtttttgcaagttaacaactgacacaaccgctttgttgaccttattaaaggcagttgttgtttgtgaagatgagttgactttgatattactaattttagtggcacctgctttagttggtacttgggcagtgcttgagacagtgttacttcccatctttgaaccggcataaccagcaacgccaccaccgattagtgctgcgataacggcaacaacagccgttttcattaatcctgaattctgattcatactaattcacccaaactttctaataaattctgtttattgattatctctatcatagaatgtaaatttgaaaaaattatgaacaagttacgaatattaaattgtttttctaatccgcattttagcgaacttatttcgcaaaaacaactaaaatgtcttctattcagtctaattacacggcaaacaatggatcagcaactgccggatcagtatctagaatttcaaagtctattcccaccccataatcatgttcctttaagatcgacgcaaccgtcaaatgggccagttccttcatgttattttcttgactcaagtggcctaggaaaacgcgtttagtctggttccccataaacgacatcaaagcggatgccccatcttcattcgataaatggccggtatcactgagaatccgttgtttcaatgaccaaggatactttcccatccgaagcatctctaaatcgtggttgcattccactaaataagcatccgcattttcaattgtcccacgcacttgatcagagacataacccgtatcggtcaggattgcaaaggcacggttattatgatggaattggtagaattgggcagcagccgcatcatgtgacaccccataactttcaatatctaaatcaccaactgacaaggtactacccatttcaaaaatgtgcttgtgttcagcaggcacttcaccaataatcgaagccatcgcatcccatgttggttgatttgcgtacacgtctattccgtatcgccgggccaaaacaccgacaccactactatgatcgcgatgctcatgggtcactaataaactgtccacatctttaagatcgcggccaatactatgcattaaatcttgcacacgtttcccactcattcctgcatcgactaacactttatgattaggtgtttcaatatacgttgtgttgccagaactactgcttgcgagcacgctgacttgcattgcgtctttttctaccatgttttgctctatccccttggtctctttctaaaacaactaaatttcactacggttcttcatcagcgcaccggtaaaggcgttaatccgcttaacgacgacactcttagaattcttattctcaatggccacttgccaagctggcacgtacaccgtactactattggcgtccaacaaagcactgtatccgagtttcacccacataatgcgtgagttattcggaatctcattatctgtatataaatcaatgaccgcgtcttgagcagtcaccttcgtactttctttttcacgcaaaacttgaatcttattcgtgtaagtttgcgtgtaatgactaatctgcccgtcttctaatgtaaaaatcaactgaccatgttcatccatgatctgcccgcctgggactttttgcacatatacgacttgttgatcactcgataatgcgtgtgaatagcggtagtcctccgcttgaaccacgttgtctggttccttcataaaggccgccacggctaagcgttggttcccttttttgtaagtcagtggtttatccaattcactcgtcagtgtcatgcgcgctttatcaaacgaaacagtttgaccggttagtttggcactcgccgtttctaataatgtctgatctttttgtcggctggctaaataataaccatccattcggcgcttggagagtttcttcactgaaatttgatcgtcttttaaatccttcataatctggctagtctgtgaaccactagtaatcgccgtcgacgttattgtctgactgcctttcagcgaggcaaataaatagatatccagcgcaataaaaatggcgataaaaatcatttcaattctgcgaaaatccattcatctaactcccttcggttaattcagctttttgcgccatcaatgcggataagctacgccaaacccctttatactgtacaaagtaggttggatttaaatcaatcacttgttcgttactggtttctttggtccattcataaccgacttgcacgttttccacattttctagcaagaaaccattacttgtcaattgattcaaaacagactcggtacttggcaatgtgacttgcttgtcttcagcaggaacgggtacttgcaaactataatttgaaaaatcaatcttttggccagttggtaagaattgtactttcacgctcccaaagttagtctgataaaagactgggaatccttcaacgtaggtccgataagcagtcgaattcgttgctttatcataactatagaaacgcatccctgaaagggcgttacctgtctttaaaagcgcatcaaaactggcttcaaaactctttgttaatgtgcttggtgatttctcattttcatacttcacaaacgaaatttcaccggtatcatggttgatcgttaggcgtttatacaaattgctgtccgtcccatccgtataaatcgcactattgccttgttctttcgtatcaatattatccgtattttgttgattcaacagcgttgtgatgtaataattttcgggttgttgattaactaaataactataaggcaacaacgtttgatccgctgccacatagagtaatggcttgtgattcaacattttttcggtcactttcaaatgcacatcggcatttttaagcacctttttcacacgagcttgtgaaaaaacattgagtgtcgtttggtacacttgatgactttgatcattcatcaaccacaacttaggctgtgtgcccaacgtgattcgaatccgattgaatgtcacgttttgacctaaattattattctgataactgaagacctttttaaaaatagcgtacgaaatattatcaggatataaaagggtcaatgtatgatcctcactaattgcctggtaataatcgtcttcgcttagcttaacttgcttaaactgtgccgacttggcaagctttaaagtcgctttaaactgtggaatcaaactctcttttgagttataaatcaactgactctgattgtctgtccgccacaatagttgcgtcggcaagaagatatcaccgatttttcgttctgtcttacgacttgttgacttagtggtggtttgactgtccgtttggcgctcataatgcgcgttactggtccagattagccatgatagcccgatactgacgataatggcagcaatcagtataacgcgcattaaaaagttattaaatcgcatcccaatcacctccatcagaatcaattggttcatatggcaacgaaatgtagaatgtcgagcctttaccttcttggctatcaacccaaacacgcccacgatgcgcttcgatcacttctttagaaattgccaagcctaaaccagtcccgccttgtttacgagaacgggccttatcaacccggtagaagcgatcaaagatcttaccaaggtctttccgtggaatccctaatccttgatcagagatgcttaaaatcacgtgacgatgtgtttccaataagcgacacgtaatcacgccaccatctggtgaatatttaatcgcattattcatgatattatcgatcacctgcataaatttatcggtatcaatttcaacccataaatcccgcttagtgaagtctcgtgtaatactgtacttcttattcggatcatctgttggcaatttgcccgtgctggttgtcagtttaggcaaatcatctttatgctcttgatcccgcttgatcatcatatcaaaccgatccagtgcatacccaaagaactcgtttaaattaacatattcgagattcatctttgccgttccttgatccattcgtgacaaactcaatagatcgttgatcattcgaatcatccgatcagtttcttcttgggtcacctttaagaaattgggcgctagctctggatcttgccatgcgccatcattcagcgcttcaatatagctccgcacgcttgttaatggcgtccgcaattcgtgagacacattcgaaacgaattcgcgctgttcttgttcattcttttgttgttcggtgacatcgtggagcacacaaactaaaccggtgatatagccggtttctttttgaattaatgaaaaatcaacatgcaagattaagtcgtgatcttgttgttctgagaaatccaagaccatttcctgttgcgtttctaatagatcgcgcaaagaatattcatcactgattcgtaaaactttaagcaatgactggcccagtaactcatcgcgtgtcacatttaaaaaatcttggccagtttcattgataatcgtgatattgcctcgtcgatcagtcgcaatgaccccatcagtcatatgactgagcacactatcaagtcgccgtcgttccgactctgacgcttcttgcgcctcttcaacccgaactgataagttattgaccgcaatcgcgagttgccccagttcatcttgaccataaatcttaacttgcccagagtaatccccacgcgccatttgaatcgcttgtttcttcatttcatcaattggtcgggtaattgcccgggaaataacaatcgataatgccatccctaataaaccagcgactaaagacgaggttaagaaaatgacggtaatcgacgaaatccccttataaacatcttccatactagcccgaatataaacggcgcccacaacggtattactatccccacttgggttcgtcaatggttggatcactgtataatagctccctagactctcattgtatgccacttcttgttcggtatgcccagagtaaataacctgtttcacccgtgggttacgcgtcttttgaccaacggtactttgattattcaagttcgtgacacctcgaatggtgcccttattatcgacaacttgaatttcggcagaattgcccatatcgccaataatctctttaatattcttgttcgcattaccactattactcagtaactcattactaagttggttttgaatatagggtgtcacttgtaaggattgcttaaaatcacgcacattctgatattccagttgcttcacaaaagaagcgccgataacttccaacgttaccagcagcaacaatacgaacacaatggcaattttaaaatgaatcgattgtagcaaccgaattttcttattcatgcggcaaatttactcctgctcaggatttcttaagtagtaaccaacaccccggcgtgtcactaaccattctgggtggctggggttgtcttcaattttttcacgtaaacggcggaccgtcacatcgactgtccggacatcaccgaagtaatcatacccccaaaccgtttgtaataaatgttcacgggtcatcacttggccgatatgtttggctagataatgtaataattcaaattcacgatgcgttaattcaatcttgtcgccccgttttgacacaatataagcatcaggatggatcgttaaatccccgatgttaatctcgtgattttcttcattcgcttctttatctgattgactcgttgtaccttgccggcgtaagttagccttaactcgcgccactaattctcgatttgagaatggtttcgtcacataatcatcggcaccgagttcgaggccaatcactttatcgatttcagaatctttagccgtcaccataataattggcatatcatgcgatttacgtacttggcgggccacttctagcccatcaatcttcggtaacatcagatctaatagaattaaatctgggacagcctcttcaacttgttgtaaggcttcttcaccatcataagccgtgtagacttcgtaaccctctttggttagattaaatttaacaatgtcagagatcggtttttcatcatcaacgactagtatttttttagccatgtgcggatcctccttgaatgtggatgctttgccttctattatactcattttcagaaggcaattcaaaattaggtcaattcctaccaactggattaacgacattgttaatccctataacgattaattcttacgcgctcagtaactttattcaaaaaaaatacaaataactgtttacaaaagtttgtttaatatgctatgatatttaagtcgtaaggcgagacatcatatgggtggttagctcagctggcagagcaacggactcttaatccgtgggtccagggttcgatcccctgaccacccatcaagtatacatgataagtcgttatagaggtgcttaggcattgatatgacggcttttttatttcttcttagcagattagtattcacagtgaatacgacaaaccgtattcaaaaccgtattcacgtattcaacaaaaatcacgcacggggcatatacataacttactgcaggcggtcatattaatggccgtcttttaatttgggctaacttcattagccaacgatttaagttaaacatagactgttaaaaacatactagcaaccattagcattcatttttattaaatttgtggtttccgtcgtaaatcgcgactgtattcattagataagggggtgcctccagttttggacagacgtttcaaacgggcccaagtttagcttggttgtatttttcgacctagataatatctaggggtaacgtttcgttactccatatgtttctatatcaaaacacatctgctcaagcttgagccaatttatatctaattgagtagcacggaattttccgctgtactcattttattttgacctaatagaacgatctgttatggcaggttatttcatggttcgacaaaccgccctattttagggcctcctttttctaaactaccgtttcggtacctcagattgcttccatgcaattagccgaaaccaaagatggattgggcaacatctcgttaaaatcaacggtatctaaagttaattagggccgaattttcggccgtactgtttctataattggctaagtatctgacgcaccatatcagtgcattagatgctgttgtaatatactaactcatctttaaggagtcatcaattcggtgactccttctttagggcctctaaaatctctaaataaattaatgttaggttttgttaggttttatgtccaacaaaaaccaacattattcattctctttagggtgtctgatttgtacggatagaaataaaaaaagggcattttgtctacttttgtctagttatatttaacaccaaaggctaccaccacgggtttaaagctaattcacgtaggtttacattggataaaccaataatggcttgtcctattcaattactaatccataaactagcctgcgaagttttgcgcaacctacttataaacaagcaactcctgattattatagctttcggcaaaagctaataacgccctattcttaaaccgattataactagacctgctataccccatcgtgtccgctatatattgccttgttttatgactaccgtctaagtaacacatattaataatggatgcttgcgtgtcttccattcctcctacaatcgcttggatacactttaaatcacgcttagcctgctcgtgtaagggatgactagtatttactgtggctagccgtctaatcgtgtcatagctctttaacagctttctggcgttgttgatacttgcttgttggtttattcggtcaatgatcatactgcttcgctccttaagtattaattcaattttgatggcatcctaaatcaggactgcatccccgttatcaatgcttcttgaatattaataagccttcactagggtaggactcggcaaactctagcaaagcctgcttcttatgcttcttgaatgatgatgctgttatacctagttcaccgcagatataagccatggttaatttaccagcacttaaatactgcatctttagcaattccctgttaattaccgttagcttacttaaagccacgtctatgtattctagggtctgccgtgcctcgagtgttttaaccgcccgtttctcggttgtattatcactgctaaaagactttggcgcatgatcacaaataggactctttaaatgactggcactacctgcaatatgtttcactcaccaatatcgctttaataatctatctgcttgctgtctgctcttatcctcatcaatatcaaaaagaaacactctgacacctccaacatattaaaaagggatgcactattgccatgtactagcagtaacgcatccctttggttttccaatcaggtattaaactaatttagtcttgtctgttcgttcaatgaacaccaccttattattttgagttgtaacagttaagctcccataacttggtaactgatattctttgctttgctgttgatccgtaataataattttgaccatcatatcacctctaaatatcaatcccaaattcttcagttagttgatgatgtttagcgaattccttgccacggtcgggcgtaatcgtacccaagtgttctggtggcagatcttttagtagtcttcgaatagtagtggtcacactggctgagtttttcttagctgctttgtgcattattaagtatcttgaacaacggtcaaccattgtgaccacacaagatctgccagttttgccagctacagtatccagctcccagtggccaatctgagtccgcttattggcagactcaggtcgttcttggagtgtatgcgatataggaatcttcccgcgacgttcctcataaccttttttatggcgcgatttaccatgatgtctaagctttctgatcacccctctggcacctcgtgatgaaagcttctgatcaaataaaccggagtagatgccacgataaatcgtggtgtagctgatctgaaatgatgaggtctctaattttaagcgtgcggcaatttcttctggtgaccattgtagatccaagaataaatgccggattaattgaagcaattggtgatcagaaagtagcgaccggcgtccacaatgagatttttgagcttcgtagcgctcttgagcaacagaaggtgaatatgccgatctatttcgcgataactcacggctaactgtcgacgttgctcgaccaattgtttgggcaattgaagtcagtgaagcctgattattatgcatcaggaatatcgtttcgcgttcactcatggtaagatgtttgtatgggctcatgattatgtgctcccttcgatggttgtcttcgcaaacaccattttacagggattcatatcatgagtctcttttgttgcacttaaagtataaattcaaggcaataaaaaacgttcaccgcaagtgaacgtttttttgacttacctatttagtttgtgaaacggtgttgcgggcgctaacacgtttgaagacgtggacggcaacccctaaaacggcaccgactaaggcagggactaaccaagctaagccgtagttggcgaatggcaagtatgcctgttcgaagccagtcatcgctttaccgaagctactttggctgacgaccgctggaaaagcagttaccatgtcgaaaaaagcaggaacaacggtaaagagaacaacgaatttatacacgactgggtctttgtggaacagtggtgaagcgactgacaataaaatcaagaccattgatagtgggtataagaacatcaacattggcgttgaccaagcgatgatttgatttaaaccgatattagcggtcaagaatgatgccagagtagttagaactaaccaagtgcggtagctaactttgggaaaatgtttatgaaagtcttgggcaaaagccgcaactaaaccgatcgccgtggttaagcaagtgacggtgatcaaagtggctaagatggcctgaccagcgacgcccatataatgattgacaatttggtcaaaagcgatgccgccattagcggaaactttgaatttacctaaggacatcgcgccaacgaagatcaaaccaacgtagatgacggcgatcattgccattgcgaagacgccggcacgggcagtgaccagcgcaacactgttagcgcgttttttgcctaaggtgcgaacggcggtaactacggtgaccccgaaggctaagccagctagggcgtccatcgtgttataaccttgcaagaaaccattgacgaaagagcctgatgtataagcagcggtggcgtgttgaacaccggcgtggcccattggtgaactaaaagctaagaagaaaacgccagctaataagactaagaaaactggatttaataacttaccgatattgttgacgattttattttcctctaatgagaaaaagagggctaagccgaagaaaacagcggagaaaactaataaaccaactgtttggaaattctttggtactagtggcgctaagccaaccgtgtaggaaacggtggctgtccgtggtgtaccaaaaagtgggccgatggtgccgtggatcaagatcatgaataagagcgcgaatacgggacctaaaggccgcccaacatcatagacaccttcggaacgagtgatactgattgctaaaacggataataatggtaataacacaccagtgactaagaagccaagcgcggcaggcacccaattctgtcccgctaactggcctaaatgtaatggaaaaatcaagttaccagcaccaaagaatagaccaaaaagcattgaactaaccacgaaataatcgcgtttagtgagtttacgttcctctaacataagcagcactccttaaattttgtaggtttgtggaaatgtggttcaaagactaagcgtctgttgccccacgtttaaatcatgagtgttgccattgctaagtcgactttagtaatggcggcgatcatcctgcgcgggaatgatcacgataaacaaaaaacgtccaaacctgaaaaattaatttcagataaggacgttaataaacgtgttaccaccttgatttgccattttctcacgaaaacagcctcttcgggtacaagcaccgattggtacgaaataccctagctcgataatgggagcccccaatgaacgctcaaacttcgcatccatcgctcaaagatgattttctaattgtcgcaccttgacgtccttgcaccaaacgacgctcgcttaactggtgaatacaattatacttttcttatcacagcgtttaattttctcattgatttatcatgtggctataatttaacgcgattttaagtgtttgtcaagggggtgataaaaataaatttataatttaaggcagtagtccatattgaattaacgtgtcaatgctatctaatacgatggtcgtattatcaaaatgtggctgccattttaggatatcttgcgctttttaggtactcaactgacgattgacgtgcactaataaattgccttcgcgggcggtctggttgaacaaagcagcgctgcttaaaagcaagttcggcatcgttttagtgggaatgttttgggcaatttgcggtcgtttttggcgaatcagtgctgctatctctggtagtgatatctgaccagcagcactagccagaaaacgttgcccgccagcgtgaggtgcggtcagcgcacgaatgtataagtcagcaacatcgcgcacatcgatcagattgagtgggatattgggaatcattttgggacgaccgttaagtaaatttttcaaaagatcgaagctgccagaaacgtgggcgtctaatgctgggcccataatcgccaccggattgatcgtagtcagttctaaactgccgtgactttgttcaataaactgccagacagcctgttcggcgatcagtttgaatttttcataggccgataagcctttttcgttaggatcagtccaatcggcttcagtggtgatgctcgtttggtcgtgattactgaagccgatggcgccaaagttggcggtcatgacaacacgcttgacgtgggcctgttgggcggcctttaaaatgcgtaaaataccctcggtggcagttgtgtcgctgttcgggtcattggaaaaaacgggtgatgctacacttagcacgtagtcgatgttctgcatggctgtcgcccagccagcatcttgagtgagatcagcggcgaaaaaacttaaattttcgcggtgttgcgcctgattttcttttagggcggtgcggacggtggtttgtttgtcgagttggcgtaaggtggcacggacgtgataaccttgatttaaaagttgtaagataatgtgcagacccagataaccgttgccgccggtaactaatacgttttttgtcatgatattatgctcctattccctaatatggatcctaatgaacacttggaacaatacacgttatttcgagtattagcctttactggtgttaggtgtggcgagtgcttagccctaacttgggatgacttagacacacaaaaaggcaccttgagtattaacaaaacgttaactcaaggtgctggcggtaaacagattatccaagcgactaagaccaagaaaggtaaccgactaatctcacttgataaacaaaccctattctatttacgtaaatggcagatggaccaaaagcggatatatttcatgctgggctttaacacatcccaacctagccagctaatctttgcaacaactaagaatacctttaaatcactaaacacgccctctaaatggcttagacggctaacagatggtactagcctaccaaagataacagttcacggctttaggcacactcacgcatcggctttattctctgctggcacatccatcaaagaggttcaagaaagactaggtcacgaggacgcccaaacgactctcaatatttatactcatgttactaatagccaaaataaagaggccgtccaaaagctggttaatttcttagatttctaacaaaccgtattcaaagacgtattcacatcataaaaactatgtaataaaacccctataactactggtatactggcattttaacgtggaacaggctcaaacccctgaccacccatcaagtatacatgataagtgataataaaaacgcaattgcgtttttattatcactttttttatttttaacttaaaaaaccatccatcaatgatgtatgatttctagactactctttaagttctcccccgtagccaacatccttatattgtttcatcaactttaatatctgcttactattcttttgatcatgactatacggctgcgtctgtgtccgatgatcgtacagctttaccttgccgccttttcgatcagctaagtagatatccttttccatcagattaatctcatgataggcatcctctgggatctcaaatgcgactgttttattaccaaaaggactccgcgtcttctccccataaatctggatattttgcttcccattagagagattataagttccttctttactctctaaaggtccgaagatgccacctgacgaactggcagaggtcggcttcaattcaccatatacatttaaaacaaggtgcccggccttcttttcaaaaaaagtattgttaatctttaaatctgataattgcatttcagttggtcggttcaaccatgcattaacgcccaaaaaaactaaaacgaagatgccaatcgcaccaacatatttcaaactggttttgagtacccgataaattttatttttcattaacacactctccttcaatttcgaatcattgcctagtagataatcaatgcttacgccaaacaaactactgatagccattaatttatcgatatctggataactcacttcattttcccatttggaaacagtctgccttgaaataaataattgatcggccaagtcttgttgtgacagatgttgcgctaatcgattcctctttaattctgctgcaaaactcactttgccacctcctcaataattgcatcatagcttacaattaacaaaataacgcgcaccaaataagtgccccacgtttaaaactagctatttcctgctttgcaagcaccacttgcttttcattctgacaatctaccgttatgctagagctaatcatttagggaggtttaaccattatgcttgctaccattttaaaagaacgccgactggcactgaacttaacccaacaagccgttgctgaccaattgcacaccacgcggcaaacaatttccaattgggaaaccggtaagaactatccggatgtccccatgttaattgccatcagtgaactttattctctaacaattgacgacatgctcaaggctgacgatgattatgtccaacaagtctctgatgactatcaactgattaaacaaatcaaacaatcccacgttgttgattggggattaggactctcattagggacattacttgtgattttaatcgtccacgcctttttccctgcagtcttaaccgaatcaatgtctgggctattaactttaagcgttgcggttgttttgattggcttcagttacttcaaaacacgccaattttatccaattataccgcatgctaaacagcccttaattatccctaagccaattggggtcggcttaacgattaaccagaatcacccactcggaaaagtcatttgggtattgattattctattcttagtaggtggcctcattccaatgattttcaaataaaaaacgtcatccaatagatgacgtttttatgtttatgcgtatagagccttttgattatatttaacatattgtttaccaaagctaacaaccattcctgatatcttcttagcgactggataaagcacaagcccaataatgaataatgccagacatgaaatcaattggaataccataaagcacactaagtgtttttaaaacatgaacgtttggtaatgttttatcttgctcccatctagaaaccatttgacgtgtaacaaacaatttctgtgcaacttgttcctgcgtcaccccaacattcatcctagcttcctttaaagcattcccaactgacattttgccacctccgctataaacctaatttaacgaattaacccccacaaaaacaagcaacaaatctgttgcatccctgatattaaagcatttcaactcactggcagtcttttatttcccgggttaattcccgaaaacagctaacattttctttgttgccttttgggtcttcacgagttcaccttgaatacaccatctgcggaccgttttatcacaggtaatcaatgtcaccattttacgacctggtacatcatcgatgacttttacgtcgtatggactgattgaagctttgtaatcaactttgtacgtgtagactttttccatatccgttaagtagaccttatcgctgacgcgcacattttcaagtggcagaaagatgttttggaaagaatgccctgctaaagcataattgttaactgcacccatttgctgatcaggtttcattgtgcctccaccttgagccattgtgtcctctgagacgcctttcatgactggcaaggccatcttgacacttggaattgcaacttttcctaagacaatcacatcgcctttaatagcggcattcacaatctgttttgtatcgagtgaatcaaccttatcaaaatcaaagctcgcttttttatgttggtttttcttaatttgagcagctgtgacgtccatctgacgatgcgccatcattttaaccagttggttgcggattggattgatgaagaccaacactaatccaaccactaacagaatggctaataagccattaattaatcggtttcttgtctttttttgcataacagtttaaacccttcactagtatttacgactattgtaacacactattttatatttaccggctctaaatccttgtgattcgcaattaataacagcaacacataaaaacgcacaaccgaaactttcggctgtgcgtttgttgtttattttacgtttaagatgtacataaagaccacgaaaacaaagaataaaacatacataattggatgaatttctttgcgacgaccagctgtaatcattgtgattggatagacgataaagcccaatgcaatcccgtcagaaatactgtaagtcagtggcatgcctagaacgattaagaaggcaggaattgcaatttctaatttttcccagtcaattttcttcaatgattgagccattaaaacaccgacaatcactaatgcgggggccgtcacttgtgacgtgacaaccgtcaataatggtgagaagaataaactgaagacgaataacacacccgtcacaacggccgttaaaccagttcgaccaccaacagcaatcccagcggacgattcgacaaaggccccaactggtgatgttccgagtaatgacccagctaacatggccgttgaatctgataccaaagctttcccaacgcgaggcatcttgttatctttcatgaagccggcttgttcagctaaaccgaccaatgtcccggcggtatcaaagaaggtcactaataagaaagtgagtacaacgacccacatttgaacggtgttgatatcgccaatgtgatttaaaccagctaagaaagtgggtttcaaacttggcgcagctgcaacaaagtgtgttggcaacttaattaggccactgatggctcccacaattgaggttagaagcatcccgataaagattgctcctggtactttacggaccattaaaataacggtaatgattaagccgaaaacagttaaccaagtcgtcccttgcgagaagtcccccaaaccaacaacggttgatttgttcgcaacaatcaagccaccaccgtgtaaaccgatgaaagccacaaacatcccaatcccagctgaaatcgctagtttcatattccgcggaatggcatcaataatgatttcccgtagcttaaagacagtaatcaacatgaagattaatgaagccacaaatacacccgctaaggccgtctgccatgacacacccatcccgataaccactgaataactgaaaaaggcattaatccctaaagctggtgcggttgcaattgggtatttagcatataaccccatcaagaaacacccgatcgcacttgctaatgctgtggctgcaaaaacagcccctttatccatccctgaatcacctaaaacgctcgggttaacgaataaaatataaaccattgaaataaatgtggtgaatcctgctaggatttcccgttgcactgttgaatgttgttcttcaatcccgaagaaacgacttactctttccataacgactcctctaaaccaactaattttcccactatctttttagtggtaatgtgtgtataatactgactggtgccaaacccatgagaatgaaagtttgttggcgtgtttaacgacacgtttagaaaacgaactttgcattctctttttttgtactctttttcagcaatacctaccagatagcagataagacatttgtttgttcacgatctggaccaacagcaaatgttgctaatggtaaatcaactaattcttgaattcgttcaacatagtgccgcgcattagctggcaagtcttctagcgtcttagcacccgtgatatcttcatcccaaccaggtaattcttcataaatcggtgtgcaacgttctaattcgcggagacttgctggataacgatcgatttgttcgccatctaattcgtaagcgacacagatcttcaatgttttaatcccagttaggacatccacacagtttaatgataattgggtcacacccgccactcgttttgaatgccgaagcacaactgagtcgaaccagccaacgcgtcttgggcgaccagtaacagtaccatattcatgaccggcttcacgaatgaagtcgccagtttcatcatctaactgagttgggaatgggccatcaccaacgcgtgaggtataagccttagccaccccaaccacttcgtcaatccgtgaagcaccaactcctgaacctgttgaaacgccgccggcagggtttgatgatgtcacaaatggatacgtaccttggtcgatatccaagaggatgccttgtgcgccttcaaataagacattccccttttgatccaaaacatcattcaaaacaactgaagtatcacaaacatattgtttaatttcttgaccatattgataatattctgcaaacattgtctcatattcaagtggttcagcaccgtagattttagtaaagagcgcatttttttcgtctaagttttgttttaatttagttgcaaagagttccttgtccaataaatcggcaatccgaatcccactccgagcggctttatccatataagctgggccaatcccacgattagtcgtcccaatcttttgatcacccttggctgcttcttgtaagccatccaatttagaatggtatggcaagataacgtgtgcccgatctgatactcttaattgactcacgttgatcccttgatccgttaaatatttcaattcagaaacgagggtcttcggatttacaacgaccccgttgccaatcacgctgagtttgtcactgttaaaaatcccagatggaattaattgtaaatggtaagttgtgtcacccaactgaatggtatgacctgcattgtcgccaccttgataacgcgcgatagcatcagcattttgacctaaaaagtcggtaatcttgcctttaccttcatcgccccactgtgttccaacaactactacagatgtcatataaacatactcctctattcgaatccgtcttcagatccgctatttaaaccctaaaactcacaaaaactattgtagcaacaaattatctcaaaatcaatataaaagacgaactttaaaatctctaatcagcctttattcagtaaaatcttaacgatacatataaccgataaaatacgaacgtaaataacgaacaatgatccctattttgacaggcgttcattaaaaaaatacaatataaccacatctaacaccaaaggagctcatcatgggttacgtcagcaatatcattactgcggcaattgcctttccattcgtcgcaatcatcttaaccgttccactgttagtttaccactatcatcgttatggttcgctaaccatcctgcgtagtgtaattctctacagcttcatgttctacttggtagccgcttactgcttaattattcttcccctccccccacgctcggtggtcgctcatttaaccaccccgcgctataacttagttccctttacgtttgtccgggagtttatcaactcaacccatttcgtttggaccgaaccgagttcatacctcgcaacacttaaacaagcggcaaccattcagccgttgtttaacatctttttaaccgttccatttggcatttatttacgttacttctttaaaacgtctttcaaacagcccttattacttagttttacgttatccctattctttgaactcacgcaactttccggactgtatggtatttatcctcgcccttatcggttatttgatgttgatgacttattgctcaacatctctggcgggctgcttggattttatctccagcccttggtcacctttttcttacccactcgtgaaagtttggatcaagcagcctatgcgcgcggtcaaaaagtgggctacttccggcgcttattggcacttgccgttgattactgtgtgttaggcatcattacatttgcaattgctgttatctggcgattactaaaactacccaccattcattcagaaatgcttcagtactgcctgacaactggtgcttacttcttaatgctccccgttttttggcgtggcaaaacacctggtcaatctctcctgcaactacagattgtcgctgaccatcatcctcgttgggcgatcttctggcgccagctactcctatttttcatcgtcattcccagttttcaactctggcgcgtcaccctggatgccgctgttgctagtggccaacaacattttgacgtctatctctttattatcggtctctcactcttaccaccactgttattcaccggtaacttcttattaagttgggtgactaaacgaccacaattattctacgagaaactaacccatacacgggtcattagtagcattcaccccactcagcaaccttaaaaaagccttaaaatcatctctaattcctaaaaatagttaaaatcggatactttacggcttgaattggctatactaaaggtatcattcgctttgagaaaggattattgcttatgtttaataaattgaagttcctcatccccattgcatttactgctattatcggtctgagcgcacaaccggcctttgccgacagcaccacatcgtgggacaaacccgttgccactcttgggaccagcctttctagcacccaaaaagctgataccctcaagacactggaaaatgccgcgaatgtcacagatgtcagtgaactaacagtgaccggttccacacttgtaaaatatcttgatcaaaatcaacaaacatttaacgccaactcaagtgtctactcaagtgctttaattcaaaaaaatgacagcaataccggcatcaatgttaaaattatcgattttaatggccgtaacaacatcaccacaattacagccaaccaatataaaaatgcggccttaaccgccggcgtcacgaatgcgacaatttacgtgacttccgccattccaatcgatggctctggcgccttagctggtgtttacgccgctttcgctgaaaatggcgattcactcaaccaagcgcaagtaactgctgctcaagacgaaatgagcaccctcagcgatatcacacaggctaataaaggcaccgatggttattcagattcccaattgaataatgccgtcacaggtgccaaaaaagacatggcaagtaagggcaataatctgactgttaaccaaattactaccatcgtcaataatcaactcgaacaaaacaacctcaccaacatcatcaacaataatcaaaaacaacaaatcattaatgttctcgttaaaatccaagattccggtgctttaaattcggatgatttcaagaatcaagccggtaagttaatgaataatatccaaagtggtgcgaaaaacatcttcaataagctcaacacccaaagcaatcggaacttcattcaaaaactctttgatagcatggctaatttcttcaaaggattatttaactaaataacacaaaaaagccccgcaaactgaagtttgcggggctttttatttattcattatttcgttgttgcttttaaggcaactgcatctgcagcaactgtggtactcattgcgttaaacttaatgtaatcaacagcgggcatgttggtaatgatcaccatcattgccgtcttcttaccagcagcagtaatttgattcaaatcaaccgttgctaataagtcgccatgtttgattgtttggccttcttcaacagcgactgcaaaaggtgcgccgtttaattcaaccgtatcaattcccatgtgcactaagacttctaaaccgttcgttgttttaatcccgattgcatgtttcgttgggaacacagtcataacagtcccatcaactggtgcaacaattttgccgtctgttggaatgacagcgtagccatcaccgagcattttttgagcaaaagttggatcatcaacattttcaatatcgatcaattcaccattagcaactgcatagaaaacatctgtttcacctgagttaatatcgctatcaacaggtgcttcaactggtgcggcagcttgttctggtgtacttgttgcgattggcgtattgtggttataaagttcttttaaagcatcagcaacaaattggacttctgtcccaataataatttgaatgtttgttttatctaaaacgttaatcccagcagtaccaacagctttaatcgctgattggttaacattggcagtgtcttctaattgtaatcgaagacgtgttgtacagttgtcaatcactttgatattgtctttgccaccgattgcagcgtagatccgttttgcttgaaccatgaatttatcatcagtagcgtctgtttcaacgccagcagtatcttcatcaacagcatcttctgcttcacgacctggtgtcatcaagttaaacttcttgatggcaaagttgaacccaaagtagtaaataactgccatgaccaacccttcaaccaataacatcaacggttggttagcaactgggtttttcaaacttaaaacataatcgactaatccagcactaaatgcgaaaccggctgtccagtggaagaaagcagcaacagccaatgaaatccctgtgaaagctgcatgcaatacataaagtggccatgcaacaaacatgaatgagaattcaagtggttctgtcacccctgtaaagaatgacgcaaaaccagcagctaacatcaatgaagctgttgctttacggcgttctggacgagcatttttgtagattgcgtaagccccagcaggtaagccgaacatcatgactgggaagaaaccagcttgatacatccctgtcttaccaatcacagctgaaccattcgcaagtgatttcgcaccacccaagaaattcccgatatcattaatgttagcaacatcaaaccagaacacagagttcaaggcatggtgtaatccggttggaattaataaacggttgaaaaagccgtatagaccggcaccaaaccaacccaatttagaaattgcttcaccaaatgacactaatactgtaaagacggctggccaaacaaagtacaagatagctgaaacaaccatcattgcagttgccgccataattggcactaaacgtttcccactaaagaatgagagggccattggcaacttcacgttgtggaagcgattatacattgcagccgcaattaagccggcaataatcccgattaaaacattcccttcaatcttaccaaaagctgggtttactttagcgatgtctgataaaccttgcatcgcttgaattgaagcaggtgccaagattgtcttaggcactaagaaagcgactaaaccagcaagtgcagctgcaccatcttgatccttagacatcccgagtgctaaaccaacggcgaataataatggcaagttatttaaaattgcaccgccaccggctgataagaaaattgtaaagacgtttgcgtttgaatcgccattgccaacccagttcgcaatccccattaaaattgcggctgctggtaaaacagcaactggcaacattaatgaacgacccattcgttgtaagtaattcttcataagtttttctccattcatttttttcgttaatatgattaaatcattaatgtaaacgataagcaagcgcttaacaaccggtatagacctttataaatagcggttgaagcggtttcatgcacacaaaaaatattggtctatacctaaaagttaacaaatgatatctgattcaccaaataaaacggttgcattcacctaccacactctctatactgagggtacaaattaatcgctttgcactaggggtgttcttagaagaactgagataggtttgtacagcctgatccctttgaacctgtaagttcagacttgcgtaggaaagtgcctttctttagactactcacaccacttttctatgcattcgtgcatcgttaagtggtttttttagtttttaagggaggtttttatatggttgtttcactgttagaaaaagttagagcgctcaatccaatcgttgctaatgtcgcaaatggcgtcacaattgatcaggtcgccaacgcacaaaatgcaatcggtgcctcaccaattatgtctaatgcaccagaagaagcggaaggaattgttaccatcgcacaagccattacgattaatattggtagtttgtgggcaccacagattcaagaaatgatggccctaatgaccgccgcttatcaacaacaaaaacccgttgttcttgatccagtggcagttggctcactggcctaccgccagcaaattatcgagcaactattaatacttgacacaccaactctcattcgtggtaatgcaggtgaaattgcttattttgctgggatagattggcaagcaaatggcatcgacgccgggcatggaaatagcgatccagtcattattgctaaggccgcggccaatcgtttacacaccataattttattaacgggtccgaccgacattattacagacggtcaacgcgttacgctgatttcaaatggtacctcactttttcaaacacatgttggttcaggtgatatgttatcgggtctctgtggtgcatttgttgcagttcatcctgcagatccctaccaagccgctatcgaagcagccgccacatttgccgttgccggcgaactagtagccacagcaatggaaacaccgctacctgggaccttctatccccaattaatcgattatttattccacattaccccagccaaagtagcaaataccgtccaactaagtgaggtgcctactcatgaatgaattcccacaagctctaaccatcgtcggttctgacagcggtggtggtgctggtatgcaagctgatattaaaactatccaagagcgccatgtttttgcaaccaatgtagttgtcgcaatcaccgctcagaatacgcttggcgttcaagccagtctgccactaccactatcactaatcaatcaacaattcgcttcattggctactgactttaaaattcgtgcctgcaaaacgggaatgttggcagatgctgaacatgttgcaacggtcgctggaaatctacgccattatgattgggggccgctcacccttgatcctgtaatgattgccaagggcggtgcacagctacttgccgacgatgccatcgataccctacgtactgaattattgccgctagccacagtgctgacacccaacttacccgaaaccgaagttctcacgggcagccgcataaagacaacagctgatttcaaacaagcggcccaccaactccaacaaatgggcgccaagaatatcattatcaaaggggccatttagactatcaatcacaagccgccgattacgtcctctacgctgatggacaagatgaatggttaactacaccacgaattgctactaaacgaacacatggcactggagatacgttttcagcttgtttaaccgccgagctagctaagggcacccctttgaaagcagcaattcatattagcaaagcctttatccaagccgcaattgctaatccgattgctgttggtcacggccacggaccaaccaatcactgggcttatcaggaggttcatcatgactaacatttcccgggaaatgttccaaacttatttggtagcgggtacccaaaataccggtatggatgattttctaaacattctcgaacaagcactacaagccggcattacctgtttccaattccgtgaaaaaggtgctggtagtctgcaagattccgatgcgattttaaagtatgcgacagcggctcaagccctttgccgccattatcaagtcccatttattatcgatgacaatctcgatttagcacttcaaatcaatgcagatggtattcatgtcggccaaagcgatcacccgtggcataaaattgaaacggccaaagcacacggcttaataactggtctatcttgccacactgaacaagaacttcaccaaagtcataatcaaccgatacttgattacattggcattggtccaatttttccaaccaattccaaagaagatgctaaaccagcacttggcactaatcgcttgcgtttcttaacgcagcaaagtgaactaccggttgttgcgattggtggtatcaaccaagaaaacgttgctcaagtcgcaaagactaccgtggatggagttgccgttatctcagcaatcacccacgccacagatatcgctcaagccgtccaagcattacaaaagccatggcaccgcagtactgatgaaaaccaatcgtaattaacccttattacggtttgacccattctgaatagtatttgctgccagtttgatccaccaaacatttaaaaaagccgctagaaccctttttatagagtactagcggctttttcttggtaatttgctgatatttagcttagtgctttgttagtgatgactactccatttaacactactcggtaaacttattcattagcaagggcttcaaaataacttgctttttgctgcgcccagtaggcctcttctgcctcatcaatcggccggagtacccgacatggattaccaactgcaatcacgttatcaggaatgtctttagtcacaactgatccagaaccaatcaccacattgttcccaattgtcacgcctggattaacaaccgtattgccaccaatccacacatcatccccgatggtgattggcttaccatattccaaatcatcccggcgttcttgtgccgtcgttgggtgaccagctgtgtagagtcctacacgaggtccaaagaaaacgtggttcccaatcgtcactggtgctacatcaataatgatgcaatcgtaattcatatacacatgctcaccaatgcgtgtttggcaaccataatcagttctaaatggtggctcaatatataaatctgagccacttttcgcaaataaagacttggttaattcgcgtcggtaatcttgttgttcttcagtggtttgattaaacaaccgagtaagtacgcgcgcgtgtttcatatcggctcgcaattctgaatcgttcgcccgataaatttgaccattaatcatgcgttttttttctgacatttctttatcccccatcactactaaaataggtgcgtcacaattgtggcgcacctttttaatttaccaaattgcaacccgtttagcgggtgctaagtacatctgatcagctttcgttacattaaatgtctcgtaaaaggctgccaagttttggacctgaatattggcccgcaacgcgtttggtgcatgaacatcaatatttaacaataattgttgatattgctttgtagctttcatccgccaaatcgttgcccaattgacaaagaaggctgccaaatcaacatcaggttcttctttggctgcttcaagggcacaactcaagccacccgcatcggcaatgttttccgagacagttaatttcccgttaactgttgcgcctgcatattctaggccatcaaattctgcaatcatttcttccgaaagtgtcttgaagtgagctaaatctgattcttgccaccaattatgcatgttgccatactcgtcgaattgcgcaccgttattatcaaaagcatgtgagatttcatgtgcaatcactgcaccaatcccaccgtagttagcactgctactttgttctaaactgtaaaaaggtgcttgcaaaatagccgcgggaaagacaatgatattcttcgaaggtgaataataggcattaactgtggcagcgcccatttcccacttattacgatccaccggttgagtaagtttcgcaaaattttccgtttcaatcgttcgaataaagtcagctgtattttcaaataatgtcccatcttctgctttaggtactgtgaccaacttcgcaaaaataggggcaatctgatccgggtaaccgacatgaatcccaaggtggttgagttttacaatcgcttgttggcgtgttttttcggttagccagtcatttttttcaaggcgtttttgataaacaccaatcattttttggaccatcttttggacgtcggccttggctgcttcaccgaagtattgccgaccgtaataatcgccaacaacttgattgaacatccctaaggcaaggtagtaagcactcttttgttgtggacgagcttccttgctaccagataacgcacgactatagagcgaactaatttggcgtgcctcttcattcagataaccgctccaactacgaactgtcatgactaacagccacgctttgaacgtttcgaaattggcgtctgtcacaagctgactcagttgcgcaaaatacttcggttccgtcacgataattttttccggttgaacaggtagcaccttgctaaataaacgtggaaaatcaagcgtcgtttgttgttgcataaaatcactcaaaggctgtggattatagagtttcgtgtaatccgctgcttcttcggcactcttcacataaggtgccagtgaccgatcaaatgccaacgctaatttgaccgtcttcgttgcatcaacgggcgcaatcccaattttctgcaagagctgaaccatcatatccgtaaagacggccaataaatggtcagcattgggattgtcagcttcataataggtcttatctggcaaaattaagtcgctagcttccgcatacaacgcgtgatgggctgtgtctttcatgtcagcatcgacagataagccaaatggtgttggtaacccggaaagtacccaatcagctaacccacgattgtaagttgctaaactatcgagagattgcacccgggctaccattggtaggatcggtttcataccgagtgcatcccgcgtttgaaagtccgcagctagttcgtaataatctagaaaatgttgtaacaatgcgttctttgcggtcgacatcttagcaaaatcagccattaattgctgatcaatctcatcaaccaaggcgacaaagccgcctgttgctggtttatccgctggaatttcagccgtttttaaccattcttgattcaccgccgtataaaaatcatcttgcattcgcacgtttgtcatcattgtcctcctcaaaagcagattctttcccaattttaacattttgccactttttccgttaatgctttgaccccataattgcaaaaaagccgcaatttagcggctatttcgttggtaattgtttttcaacttgataatttgaatcttggttaagtttaaacgtcttcttcaaaccgtttgatagatagattttattatcttttgtgatcatgatggcttggatattcttcggtttgttgttgatgagctgcatgccttcgacaatccccttattaaagacagcatttgaaagggcatctccatctactgatttaggcgagataattgtgacactcgctaggttattttcatatgggtagccagtatggcgatcaaagagataaatgtaagtatgcccgtctttttttagataatgttcataaatccctgccgtaacaaccgaaatatcacggcctttaatcgtaccgactgattctccacgcgcctttttcggatcttgaatgccgaccgtccatggtttgttcttccctaatggtgaatgccccataacaatcacattcccacctaaatcaataacggctgatgtcacaccattttccttaaaaacttgtttaacttgatcggcaatgtaccccttagcaatcccgccaaaatcaagtcgcatgccttttttcttaaggtaaactgtacgtttggccttattcaaaacaacgtcatgataatcgactaatggtaacgcttggtcaatttctgcttgtgctggcacccgcgcgcctggtaacccaatttgccataaatctgtgattgcaccaatggccatatcaaacgcgccatccgattcttgactataatgtaacgctttttccattagtggccacatatctttgctaacctgtacagatttaacaccggcattatcattaatcttatccaattcggaacctgatttggttaacgttgcttgattttcggactttttaatccgcgcaaaagccttatctagcacggcttccttgtctttattatagattcgcaatgtacaaatcgttccgagatagtaatcacttttttcatagggctttttgaccaacgtttctttgtccgctggcttactttgacagcctgccaataccagtgtcacccctaagagtgccaatccgaattttacccatcgtttttgcatcgttcaatcgctctccttgctactaaaatcacatggctctatcataccatgaatccgctttaattggttgtaaaaatcttctactggcgcgattctttgagttgctgataggtggcaattaatgctttaaaaacacctttatccgaataaactaaaatattcatgcgatagataattaatgctaaataagtcagtccaattagtgtcgccatggctatgaagagtcccatgctagccccgaacgcgccaacatcaccgtttgccagccgcacaggtaacataatctgtgaaaacaatggcacatagctcaccgcccgcaataatggaatatcggtctgtgatgccagtaaaaagccacccaaataacttaatgtgcccagtaaaatcaatggcgaaatggcttgttgtacctgatccattcgagacacaacagcgcctaacattgcagctaatacggtgtagagtaataccccaataattaaaaagactcctgcataccacattgctggcgcaaccaaagcacgacgaataatcggcaataactctgctaacggtagttgctgtttcaaaaactgaaacccgacaatcccaactaaaatatagacagtaatttgggtgagtaatagggctaatatcgcggcaatcttcgcgaaaaattgaatttcaatcgaaacacttgatagaatgatttccatgattcgcgaccctttttcagtcgcaatttcttgggcaatcattccagcataattcacgataaagatgaacattaagaccgtaattccaattgaaataatttggcccacttctttagtgttttcctgggaaatcttttcatgactattctggtaattaaccgtcactggtgcaatgacagttggcgtcatcaatttctggatctgttcaggtgcaacgcctgcttgttgcgccaaagctactaaatgaatctgatttaactgattctctaagacactcgcatcaaatgatggactatcttttcgttcatagtagcgactgattgtctgtcctttttcctcactcaacaacaaatagccatcaattcgctctttctggagcgctttggtggcttgttcccgagtcgtaatctgctgattgatttgatatattttaccttttaactgctgtaattcactctgttctgctggttgcggcgccaaaacagcaattctaacgggttctttgctatgatccatcaagtgactcacaccaaacgtaatcccgaacatcacaattggcattaaaatcatgattagatacgctggacttttaatattctttagaaatacttgtttaaaaatcaccttaaacttaaacatggccttcctccactttcattctaaagatttcatcgagcgttggtgcttgttgactaaactctaggatatagccattttgtgtcgctaagtcgaaaatcgttttaccaaccgtttcgtctgccaaagttaattcaaaccgctgcccgtgctgtgttacacgtgaaacaccgttgatatttgctaaagtttcgcgtgctaacggtgcttctaagaataattgcgttcggccaaactgattccgaatttcatcgattgtaccggcgagcaccacttgcccatcgcgcaacatcacaattcggtcactaatccgcgcaacattcgtcatatcatgactcgaaaaaatgattgctgaaccttgttctttaagccataaaataccttcttctaatagttctgcattcactggatcgagtccactaaagggttcatcaagaataatgagttccggttgatggatcaaagtcgcaatcaactgcactttttgttgatttccctttgaaagatccttgattttatcagtccgcttacctttcaccccgaagcgcaccaaccactcatcaatctgtggtttgatgtctgcgatgctgcgcccacgaagctgtgcaaagtacaaaatttgttgttccacggtcatctttagatataatcctcgttcttctggcaaatagccaagttggtcataatccgcagcggtaaacgcgcgacctttccagagaatagttcccgtatctggtgccataaaattcaagatcatccgaaaggtcgttgtctttccagctccattttgaccaattaagcctaatatttcgcccgacttaaccgtaaatgaaacatcgtcgaccgctagcatcgttccgaaacttttggataaatgtgataaagtcagcacgtccccaaccccctacttttcattaccttaactataccgtattcatttagaaagcgcattatctctcaatgaaatattaaaattactgattaaatcttaatagttgaaaaatatttgctatactacaattatttattaattaggaggtattattttgtccccaaatcaagccttttttcttactgttattggttgcctgttagctatcagttcatcttattttatcgtgcgtctcaatatgctaaagccaacactcaagcaaaatttcttggaccaatatcctgacacggatgaccaagcttacaaagtgcaacaatcaatgaaacaagcttatttcaacgcatccttttacaagcaagctgttcctttaacatcttggttagtccttttattctttttatcaatcggtggctgtctaacagcgctctatctagatgccctgaacattgcaatccgtcttttggggagtgcattcatttttatcgcgtttctctaccttaagttgccgacttttcaagcacagcatactttttggaaagcctatctacaagcgcatcctgaaaatgaattaaaagtcgtcatactcccactcgattcacccattcaacagcggcggattgccttactcaccaaatttaaatgttgtactcttgtagcaggtctcatattgttttacgcctctctttttctataactcaaaaagcggcaccaaccattttatggttggtgccgcttttttaattaacgaatttcaattgggttcgttggttggtctgattcacttaacttcggtaacattaattgtaagacgccatcttgatattgcgcatcgatttgatcccggttgacactaggtaggtagaattgccggctaaagcgcccataatgccgttcgctttgaacgatattgccttgactgtcactatgatcagcgaaactatcacgtttagcactaatcttcaatgtattatcttgataatccacgtgaatatctttcttgtccagtcctggtaaatcaaccgctaattggtaatccttatcggtctctttaacatctgttttgagtaagttgtccgtttcaggcgacattgccaataattgctgaccgaaattcttgaaccaatcatctccaccaaaattatctagccaattttgacgaccattcattaattcgtttgccatctctaaaacttcctttcttaatctttacaactctattctagtccgttaatcatgaaatgcaagtaattagcattcgacgttgttgagtgccaatttttaaactagaccactgatttttcagctttttgatacccgcctaatatggttttgtgctatacttaaggttccaaaaatattcggaggtaggttcatatgaaaattgttgtcttagcgggcgggcgtagtaccgaacgtaacgtttcattaacgtctggacacaaaattaccaatgcattacaaacgaaaggccatgacgttgctttcgttgatcttttcttaggaaatgatttgcacgacgtcgcatcaatcgatgatctttattcttcaacacctgttgaaaaagattacgacatcagcgacgaagttttaacagacgacgccatcaacgcattacgtactgatggttcaacacaactctttggcccgaatgtcttagagatttgtaaaactgctgatattgtcttcctcgcacttcatggtggcgatggcgaagacggtaaagtccaagcggttctcgatctctttggaattccttataccggtagtgacacactcgcagcaggtattacaatgagtaaaaaggtttcaaaggaaatcttattatataaccaaattccaactgctcggtttgtcgctgcttatcgcgaccaacccatgccagaaatcccatttgagtaccctgtcgtggtaaaaccaagtaacggtggctcaagtgttgggacgcatatcgtgcacaacgaagctgagttacaaccagctgtcgaagatgcacttcgtttcgaccgcgaggctttaatcgaagaattcattaaaggtcgcgaattctcacttggcgtgattaatggtcaaccattacctgccattgaaatcgtcgttaatgacggttggtatgactttgagcacaaattcgtgactggaaataccactcaatttgtcacaccaccaaacgatttacctgatgatgtgcacgaagccatgaaacaaatggcacttgatgctatgcaagcacttggcttaacgaactacgcccgcatcgacttcttctggagtcctgaaaatggcttacacgtgatcgaaggaaatacattacctgggatgacgccactttcattaattccacaagaagcagaagtgcttggtatcagttatcctgatctttgcgaaatgattgttcaaggtaaattagaactccttaaagcaaaatagccaataaaaataaccctgtcgacgattttcagtcgacagggttatttttatttggttcatttaaaactgattacttagttcctgattaggaactattcttaaaaaaacacgtcgattggaattcccaagcggtcatgtagtaattgaatttctttgacggtaaatggaatcttccctctaatcttacgattagccgtcgttaatgttttgcccaatacatcagcaacaacttgctgtttcaaatcatgaccctttaaataacctgatagaacaaataatttttctgccacattcagcacccccaagaaacgttatcaatcccgttccacattaggaatattacgataatgtaagaactctgtcaattaaaaactttagtcccaagtgttcacttattgacgtcatttgtcatataattaaacttataagtcaaacgcgtgataaaggacggtgctaaatgttcggacaattattacacgataagcgaactgctaagaatctaacaatgcaacagctcgccgatctactcagcgcaaaatataataccaagattagtagctcaatgatcttccggtgggaaaaaggcgctgccccatcactaaaagcattatttattgttgctgtcgaattgcaaatcgaccttaaccaattggccacccttgttgcggattctaaccgcgtcaattagccgcttttttttgtttttttcccgatttttgaatggtcttcacacctagtacatctaaaaagaacgtaaagattggtaatccaacaattaacccccaagttcctaagaaacgttctgctacaaataaaacaacaaatgtaaagaaaattggcagctgtgttttactcgacataaatcgcggattcaaaacatatgcttctagggcatgaatgactaaaatcatcaccaatatataaaccacatactgaattccgccgactgaaaaggcgataatgcacaatgggatacatgaaacgatgactcctgcgaccggtaccatcgacaataggaaaatcatgatggctaaactcggaatattaggcattttcattaccgttaacgtaatcgttgttaacactgtattcacaattgcaatgaagatttgggcttcaattaccacgccaaaggtattcacgaattttttagcaaaatacatgatatcttggaagaaccagccgtaagtactcttcaaaaagagttttccaaactgcggtaatcggtctagctcaattgtgtaaaagaaactcaaaataaacgataagacaattgtgacgcccattgttccgattccggtgatgtaattaacgattgttgatacaccgtgtttcaactgatccgtcaagttgaactgtttcatgtaatccccaatggttcgcataaattgattcgcatcaaatgatggactttggtagaaattatagacactctcgcctaatttaattgactgtttagcaatctgtggcacataaatcgttactgctagatacactaaaaaaatcaccaacatataaagcggcacaaccacagctgcgggcggaatttttgaatactgttggacctttcgtactaattgagtcactaaaaaagtaaagatgaacgtcagcaaaatgatattcatcatcgagcgtgacacatagatgaccccaatcaacgttaagagcactacaactcgtcttaactgctgattcgtcacaaatttttgatataaactcacgcaatttcctcctatggcaattctatatcattattttacaacacttcgaactaattggatattctggaattccgatagttgcaacttacatctttttaaaaatagtcgtatactactctggtacttcaaatttacacctagaaaggattttcggtatgttagaaaaaactttttataagaaactactacaacactcttttgatttccctgttaccgtcaactattgggacggcagctccgaaacctatggttctggagagcctgaagtagcgattacttttaaaaaagcgattcccatcaaacaattgtccagcaacgcatcattagccctcggcgaagcgtacatggctggcgaccttgaagtgacaagtaatacaacagataccccacttcaaaaactattaacggcggcttacactagcgcagacagtttcatgcgtaatagtcgctacattcatctgattccaaaacaatcgcattcagaaaaggcaagtaaaaaagatatccaaagtcattacgatttagggaatgacttctaccaactttggttggataaaacaatgacttactcatgtgcttattttgaaaaaccaactgatgatttagagacagcacaaattaataaagtgcaccatattttacgcaagctcaatccacaacctaaccgaacattgctcgacatcggctgtggttggggcaccctcatgttaaccgccgctaaagaatatcatctcaaagtggtcgggattaccttgagtcaggaacaatatgatttcgttcaacaacggattaatgacgagggccttagcgatgttgctagcgtccaacttgttgactatcgcgaactcaaacacgccccattcgattacattaccagtgttgggatgtttgaacacgttggtgaagaaaatcttggtgcctacttccaagatatcgctgactacctcactgatgatggggttgccctccttcatgggattacccgtcaacaaggcggtgcgcgcaatgcctggattaataagtatattttcccaggtggctatgtacccggtttagttgaaaatacacaacacattatcaatgccggactacaaattgccgacatggaacccctccggcgccattatcaaaaaacgctggaaatctggactgctaattttaacgcccaaaaagacgtcattttaccaaaagcaggtccagaatttgtccgcatgtgggatctctatctccaagcatgtgcctcatcgtttgaatctgggaacattgatgtcattcaatacctcgtatcaaaaggccccagcgcaagagacctcccaatgacaagagaatatatgtatgattagagtgctgactgtcgcgcttagtcattgagcattaattcaaaaataacataaatccaggttttaggatttatgttatttttagattaagcggaaattactgcgacaggaagcacgtttagagtgctgagtcgaacgggttggctttgaggattacccaaaaaagacccgctaatcaacaatgattagcgggtctttttttattgccttattttaaaagcgcttctgccttttctctaacttccgcgtcgctcatcttaagatagggtttcattgcctcaacggttttatccgtgttccggccgttggcttccatatagtgatcccacaaagcatcacggacgattgtgttatcgtcactccaatcaaatgcttctgacatcttcatatctaaaaccaatgttttttcaacagctgctgccatattaaaaacctcccatttcttttttacaactctaatgataaacctcttttgaaaaagtgtaccaaaatacgcacttttattttttagagtcctgttagtaggtttaaaatcacgatttggctaatgccaattgccaagacaacatgggttaagatttcaaataataaaatagcatagacgcgatcaaaagctgcccatcgagtttgaaataaactaatcccaaccgcaatgttcaaactgacgtacatcactgcaaccatgattaagacgaaccagatggcggtcatcccgaaacatagagcagccaacagcgcagctaatgctaaaatgacgattatcccactgtacgcactaatctccgttagatacgcgcgcaaggtggttgtcgtcttcttcaataagtaacgcttgagtaaaaagccgattcccaaaacaaccaccagaataaatagttgtccaccgagtgccttcatatcaagcggtaataagtttggccgttggcgcaagacaatttgtgacgccatcaccccagcaaccgcaccaatttgttctgaccaactggcaatgagcaaacttgccgttgcagtattcattaatataaccagaccaaacgtgactaagccaaaccacaggttggcccactgccattgcacctttagcggttgttttaaactccgcgctaaaaattgatagtattgttgcaggagcgatgtttgctgttttgtttgcgttgattggtgcactagaccacaattgggacattggtgcaatttacgcccatatttaatatggcattgtgtacattctatcattcgtctgatctccaaatacttaatttaccgtacaactgtgactgaacatggcgcgtatttcgctaaatagctcgcatgtgtcccgattaaatgtttagatggtttcgtctttgaaccacagatgaccaagtctggttggaaactaggaatcacttcttcaacaatcacgtgtcctggattaccttcatttaaaatcggcgtcacatcttcaaccccgaattctttcgctttttgaacataaacatctagatcggctgcgatttcttctcggcgcccttcaaccacgtttggtgagagtgattgataaatgttcaaatcgccggtttccaaaatgctgacaatccctaatggaatttgataggccttagcaagcgtacaagcatagttaaaggcccgtttggatgaggttgtgtcatcatcatcgatagcaattaataatttttgatagtgcattgattcaacttcgatatttaattggcgtttttctgtcattagttaagactcctcgtttatttaatcaataatgcttctttggcatgaattaattccgtgattaattggttgactgggatcgcaatgtgcttttcggcgcctttgcgtgccacgtaaccatttaagtaatccacttcggttaagcggtgatgttgcactaaatcctggtgcattgaaggataatgaccacctgcttgttctggtgcaaacatcttgctgatgtgggcaatcgtcgtgggaatgtctaattcaacggcttctgttgcagcaaccgctgagaattccgccacaattgaacgcaagagttgttgtgcttgtggggtttggcccaattgtgcaatattacagtctaacaaggcacacaagctgttcagtgtcccattaacgcaggctttacgccagattgaaaagagtacatctgaactatattgcgcatttaagccagccgcactcaacaaggcaactaatgcttgtgccgattctttgccatctggatcaacattttgtaattcgacattcccagagcctgttaatgtaatcgcacctggtcccgttaaccccgccgtccaaagtgtaatgccgacaaaaatattttctttgggcaggtattgttcaatcgtttcgggatgcccgagaccgttcaataaacagactacttttgtcttagcaccgattaagggtttgatggcttgtaacatgtcgactagctgcatcgattttgtgaataaaataatgacgtcttgaacttctttaatatccgttggcaaagcagccggaattcgaacctgaacgggttcgtgccccgcttctacaaccgtcaggccattggtattgattgcttgaacgtgttctgcccaattatcaagtaacacaacatcatttccagctgattgtaacatgtaaccaaaacgactgcccattgcgcctgagccagcgattgcaatttttgtcatagattataaaagctccttttatgatttgaattctttttaatcatgccacatttttaagattttttcacccgtaaccgcttaattcaacttaaaaagaagctgtcaaaccgcttatagcagcctgtcagcttcttaaaataggaatttacgccttcttaaaattaattgatcaatcaataataagaccaagctataaccaagactcattgcccatgataataaaatatcaactagcgaaatgtgtcccaacgtgttgaagagttgcgccatggtcgaaacgggtggcaaaatccccagaatatagaggtagggatgccagtaattgacaatcgcttcacctaaactgccgagaaccaccatcaagatggtcaacgtaccggccatccggcgattcactaaaattcgccgttgccagaacaaaccggtcattactgaaacaggtaaaatactcgtcaacattaaggtcccgcctagccaatcccaccagctaagtcctcgaccaaaagcgtggtgcccattgagcacgtaagtaattgccaagcttcccatcccaattaggacaaagaataatcccaacaagatgagatagctaattaaactgagataaaaacggcgttgcttctttaattttaaaattaaaagtttttccatttgaaggggaaattgattgatgtaactgtaggtcaaccacgtcaataagataaacagtgtcattaataatgtagcgaggctgccgacgaaatcttgtggttgcaccgcataattgactaataaggccactatccaaaatagcaaaggcccccacaaattcccattatcaaaaaccattttctgatgcaaacgtaactgtgcactaaaggacttcataacgtaacccccttaggctaaagccactttttaacattgcttgaattaattcatcactatttttgatatttgcatacaagacgacgtaccgcgtaccatcaacaatttttaaagctaactgttgtaaagtagcgggaagtgcgagtgatcgcggtgtagttgcaaattctaaccgcatcaccttttcttccggctgcggtaattcttcaatcggcaatagccgcatcgcatctagttcataaatttcagtagccaactgttcgattaaaaaagcgttgttagtgccgacaatgatggcgcctcctttttggcggtagtctttcaaccaatgaatcatccgcatctgggtcgttccatcttgaccagccaacggttcatctagcaataaaatatctggggtccgcaaaatcgcctgcacaaagttcactttttgcagactaccgcgtgacaattgatttaacggtgtattaagtgccgccgctaacccaaattcataggctaattcattaatctgaccttctaaatttcgattgctaaactgatctaattctcctagcatccgcaaataagtcttagatgtcagtccatttggagcgagttgttcagccatatagccaatccgcatcttcggtgcaatctccagtgtcccgcgttcaatattcgtcaatcctgctagtacgttaagcaacgtggttttccccgcgccgttttgcccagtaatcgcgatacaagcttgccgatcaatccgtaaattgagacgtttaaaaagttgtcgccgctgatatttttgcgaaaaatcacgtaattctagcactgctcccatttaacttgccaacctttactggattattttgcttgccaattagcgatgttttgcgcagccaaagctaaactcaacacagcatctttagacaaatcagcttggattaagttatgtttaacggttgcagccactgcaccaatgacagccaaaccatatgtcaacacttctaaatcgcgtttaacgagatattgatcttcataaacagcttcgtggctgtattcaaagttgactttgttttcagctaaaacaccatccacgtgggtcaccataatccgatcggtcacatcgattaataatttgtggtcatctgataacgttaatttatgatctgactctgattgataatatgtttcttctgtaatatcaaaatatttaacgaccgggttatttaaaacgccaaaatcatccaaaacagcaaaaattgtttctggatttaattgcactttgcgatcggcaattgctgccatgttttcttctaaccaatctgctaattggcgaacattatcctgtgtcatatgtgggactcctttaattaatctaaatgaattctatccctccataatacaccatccgcaatattagcgcgactgactgcaccaaaaagttactgtgacatcagatgatcatcaattacgccagctccttgtaagaatgaatagatgacgactggtccgacaaattgaaagccccgccgttttaaatccttgctgatttggatcgatagctctgattttgcggggacatccgcccaagttcggggccgatttacaattggctgtccatcaacaaagccccatagatactgatcaaagcttcctgcactcttttgtaacgcaaggacggcttgtgcattattgaccgttgcattcaacttagcacgattgcggataattgccggattggtcagtaactgctcaatttcggttggtgtcatctgcgctactttggcaatttcatagtctttaaatgctgtccgaaaggcagcacgcttatttaatacagtccgccaactcaagccagcctgatacaactccatacataatagttcaaataagcgttggtcatcatgttccggttttccccactctgtttggtaatacgccaataattcaggtgaatcatacatccaatcagcttttgtcattattaccacctcctaaattgaactacgcaaaaaggctaaaaagaattcatcctttttagcctttgggattgttatttattttttcttacttgctttttgataagggcgattttcaacatcagtcttgacgattaacacgtcacagatagctgtgcggttaacatattctgtcacagaacccatcaacatccgttcaactgcattcaagccagtagagcccatcatgattaaatcggtttgatattctgtcgggaagtcacgtgcgataacattcttaggattaccaaaccgcacatgaatctcgacatctttcaaaccgtcattggtttggatatcatattttaaactgttgagataattctgtgcatcttcagagatttggaaaatagcgtctcctgaaagcatgccgctataactccctgcaaattgcttggtatccaaaacgttcaaaatatccaagcgcgcctgattcatcttagcaacccacactgctttatttagtgctaattcagcttcttcagagccgtcaactgggacgagtattcttttatattcttgaaccatgttgttcatctcactttctctatatgcacctgttacactttaagaatataccgcttggaaaaacaattcaagcaaaaaagcgaagcgcttccgcgaacatttaattagaagtagtctttcttttttaaccaccaaccgacacaaaggctaatggctaatgacaatcctaatagcacgagaaaccctaacttactctcggctagcgggaccggtacgttcatcccccagaaaccacctaacgttgtcggaaccgttagaataattgagagtgatgttagtgtcttcataatattattcaatcggtttgaaataatatctgaaagcaaatcacttaactgtgccaataactcacgatacgttgtaatcgccttatcggacttggcaaactgcaagtcaatccgatacagtaagtctgtatgtcctgacacgcgctcaaataatggacttgccttaatttgcggaataatttgctggttactcttaagccctaaatccaaatagacaacactctttttaagagacttgagtgcatacaacaaccgattgcgtgtcgaaacatgtacattttcttccaattgttcaatctgttgcgcaacgaccgctaaagccgctaaataacgttgatagatggccgaaacactctttagagcaaccgtttcaatttgaccatccaggccttctaacgtgagtatttcatcgatgagctcggactgttgatgccccacagttaataacgtctggccactaatgattaacgaaaaaggccgcgtaatatattccgcatgatcttctgaatcatgggttttaactggtaccagtaaacaaatatgggtcaatacttcaccggtgtccgttgtaaatgtttcataccgtgcgacttcattgatatcttgggccacctcaaataacaccgctggtaagtggtattttttagcgaaatggtgcatctcatgtttagttggtgcttcaaaatgaatccagtcggcacttttttcagaggttccttcaaccaactggccctcaggtgtcatttcaaaatacgtaatcatctgctcactccactcttaatacccctatcatactgtttctccccacatactgacaagttaagttgattgcccattaaatatgctacaatattggtatcattggataaggagttgacgcatatgacacaccgcattttgccacttgaaaaaggccataactttagagaattgggcggctatcaaacaaaagacggccggacccttaaatggcataaagtcttacgttccgctagtctagcccacctaacaccacatgatttagcttatttaactgattatggcgtgcgctatgatgttgattttcgctcacctgaagaaattgccaagtcaccagacaaggtccctgccaatgcaatctatgaatccttacccgttttcaaaattgatgaaacggctagtacggcatcagaagctgatctttttaaaacgttcagtgctgatccaaaaagtggtcatgaacatatgattcaagtctatgtcgacttaattaaccaagatcactccaagcaagcttaccggcaatttttcgacttgttgctagcaaacgataaggaggaccaatccttactgtttcactgcacggctggtaaagatcgtactgggatgggcgctgttttcttgttgagtgcactcggtgttccagaagaaacgattcgcacagattacttattaacgaatcaagcttctgccgctttcgtgacccaatcgcttgcaaaactacaacaaaaaacacagaaccagtctgtgttcaaaagttatcagtcattactaacggttcatcaagattacctcgataccgccaaacaagcgattgaatccgaaaatggttcgttgcaagactatttatcacacgatctccagttaagccaacacaacttagctgacctgcgcaaaatttatttagcataacccatttgtttcacatgaaacttaaaaaaggagcgtggctttgaatgcccactttaaaagaacaagtgattgaggcgagcaaaaccatcggcatcgataagattggtttcacatcggcagcgccttttgattatttagaagcaagtcttaaggaacaaaaagcaaatggtcattcgactggattcgaacataaagtgcttgaagaacgcctttatccagatttaattttcgaccaacctaaatcgattatcgcgattgctcttgcctatccaacaaaaatcatcaataagccagcgcgaactggtgctaaacgcggtagttttgcccgcgcttcgtgggggattgactaccacgatattctgcgcgataagatggaccagctgatcagcgctatcgaaacacttgctgattcagatactgaaattacttttaagccaatggttgatacaggcgaactgagcgatgtggctgttgcgcaacgtgctgggttgggcttcatcggtttgaatggtttattaattacacccgaattcggttcttatgtctatcttggtgaaatcattaccaacatcccatttgaaccagacacaccgatggccaatcaatgcggcagctgtacgcgctgcatcgattactgtccaccacaggcattaatgggcgatggccgcctcaatgccaagcgttgcttatcctatcaaacacaaaccaaagggttcatgcccgaagaattcagaccaaaaattcgcagtgtcatttacggctgtgatatttgccaacaagtatgtccgtttaataaaggaaaagacttccacttccatcctgatatggagccagatccagaatctgtgatgcccgaattacagcccgtgctaaccattagtaacaagcagttcaaacttcaatttggacaccttgctggttcgtggcgtggcaaaaagccacttcaacgcaatgcgattatcgcactcgccaacgtgaaagaccgcaccgcgattccgaagttactcgaactcatcgatactgatccgcgccctgtcattcgcggcactgctgcttgggcgctcagtcaattagtgcgcgatgtcacgcctgaaattttagactttctagaaacagccgcaaagcgtgaagaagaaccggaagcccaagttgaattcgacaatgcacttcaaattctaaaagaacgttattcagagaggtaggtccaccctagtatgtcagaaagtgctccgcaaaaaacagtccttacgcagccattaatccttttgatggcttttattaccggcgttgccgtctccaatctatattacatccaaccgattcaagcactcgtagcgaccactttccacgttacaagtggtgcggtcgggactgttgcaatgttgacacaggtcggttatgcacttggcttgttgctgattgtcccgtttggtgatgtgatgagccgttaccagctcatattacggatgcttggcttatccttactatccttattagccgcttacctagcacccaatttcattttctttgccttgactggtttgatgattggcctcacctcagtggttcctcaaatcatcattccatatgcagccgtcctcgctcaaccacaaaaacggggcgcagtgctcggcaccattctcagtggtcttctaatgggtgtgctcctatcccgaagctttagcggcattattagtagttacattcattggcgttgggtgtatctcatcgctacaattgcgattgcgcttttaatccttctggcaaccctcaaattacctaaggattcccgtccaaaaaacgggccaagctactggcagacaatcagttcaattccagggcttatcgcgcaccagcggctgttacgggaagccgccatcaacggttttttcatgtttgggacacttagtattttctggtcgacactcattttctatatggccagtcccgcctatcgtctcggtagtggtaccgttggtctattagcaatccttggtgcggctggtgctttagctgcaccaattatcggtcgcttagccgatgctaaatcacctcgctttattatcgccactggcttattcatgatgaccatcagttatcttttattcttattctgggggcatttcatgccgattctaatgctcgggattgttttattagatgtcggaaaccagtgcggtcaggttgccaatcaaacccgggtccaaatgcttggtgaagccactagtagtcgcaacaataccggcttcatgtttgcctatttcatgggtggtgcttccggttcattctttggcgccctcgcttggagcttcggtggctgggtcgccgtttgtctcttagcgttagcttatcaatgtctcgctttaatcgcccactttattctttatcgtcctaaatcaacaggttaattaatggccggtgtaacgttctcaattccgttacaccggctttttgatacctatcagtaaggcgtattcattgacagttgcatgttacgtatctaacatagttattatatagcaataaatttccaatcatcacaataggaggttccttatgacacattatctaacgtttgatcacgtttcaaagctctatcgcggtggtaacaaagccgttgatgacatcagttttactgtcgacaaaggcgaattcatttgtttgattgggacgtctggttctgggaaaacaacaaccatgcggatgattaatcgcatgattaacccaaccaaaggaacgattaccttagatggtgaaaatctcgctaatgtagaccccgttaaattgcggcgaaaaattggttacgtcattcaaaatattggcttaatgccacacatgactattcaagataacatcacaattgtccctaaactcttaaaatggtccccagaaaaacgccatgcaaaggcgctcgaattactaaaattagtggaaatgcctgcggactttttagaccgttacccaagccaattatcaggtggacaacaacagcgaattggggtgattcgcgcacttgcagctggacaagatattattttgatggacgaaccatttggtgctctcgatccaattacgcgtgaggcacttcaagacttagtaaaacaacttcaatcagaactcggtaaaacaatcgtctttgtcacccatgacatggatgaagcactcaaattagcgtcacgcattgccatcatggataatggccaaatcatccaaatgggaacgcccaatgaaatcttgcgaaatcctgccaaccaattcgtcgaagacttaatcggtcacgatcgtttgatcgaagccaaaccaaatgtcgaaactgttggccaaatcatgcttaaaagtccagtcgctatcacaccaggtaaatcattagttgatgcgattcgcttaatgcgccaacgccgcgttgataccttactggttgtcgacgaaaaccaacatttaaagggactcgtcgatattgaaaatatcgaccatcattacaaagacgcaactagtgttggtgacattatgtctaccaagattagttacgtgaacgaaaatgatttggtccgggataccattgaacggattcttaaacggggctggaaatacgttcccgttaccaacgatgatcatcaacttgttgggattgtcactcggacagccctagtcgatgtcgtttatgatgctgtctggggtgatactgacgaatctgaagcagaatccgaccaacaatagaaagggaggaatcgatgatgctcacttttttaacagaacatggctctgatttactgattaaaacttgggaacaactctacatttccgcaatcgccttagttctgggcataatagttgcggtgccccttggaattgccctcacccgatttcctaaaactgccaaagtagtgattgccattgccagcatgctccagaccgtcccctcattggcactattggctttaatgattccgctctttgggattggcaaagtaccagcaatcatcgccttatttatctactcactactccctattttgcggaacacctacatcggcatgaacgatgtcgatccgattctaaaagatagtgctaaaggaatgggcatgacgccggtacaatcaattatgcaagtggaaatcccaatggcgacccccgtgattatggcaggaattcgcctatctgcggtttacgtgattgcttgggcaacccttgcttcatatattggcgctggtggtcttggcgacttgattttcaacgggttgaatcttttcaaaccggatttaatcatcggcgggacaattcccgtcacattgttagcattgctagtcgattttggcttgggccggttggaaaaacaactgacccccgctgcaatcagataaggaggctcctatgcataaaatacgccgattcattacgagttgcggattattagttggcagtctcctcctgttaagtggctgtcagtcacttggcatcggaaaccgtcaatcacaaacaattcgcattagctctttaagcaccactgagtcacaaattctcgccaatattctgagcgagttgattacccacgaaacacaaaataaggtcactttaattaataatctgggttcttcaacggtaacgcatgaatcactaattcgtggtgacgccgacatagctgctagtcgctacgctggaactgaacttactggtactttaaaaatgaagcctactaaagatcctgaaaaagcccaaaaaatcgttaaaaaagctttcaaagatcgttacaaccaaacatggttcccttcctacgggtttgcggacacctatgcctttatggtcacccaggaaaccgccaagaaatatcatttagaaaccgtcagtgatctcggaaaagtggcggatcaactaacagctggtgtcgattccgtctgggtaaatcacgaaggcgatggctatcccgcatttaaagaaacgtatggctatgatttcaagaaagttgcgcccatgcaaatcggactggtttacagcgcactggcggctggtaaaatggacgtcgttttaggttactcaaccgatggacggattaaaagttatgacttaaaagtcttaaaagacgatcgccgcttcttcccaccatacgatgcgagcgtggtcgccactgatcagattctcaaagaacagccagcactagcgccccttttacaccgtctagatggcaaaatcgacctcgacaccatgcaaaccctcaactttaaagttgataatgatctactagaacccgcagtagtcgcaaaacaatttcttcaggaacataattatttccggaaaggagccgctaaatgactaatttaaatacttggcaacaacttgtctattatttccagcataatggcagttatgttttacggcaatttagtcagcattttttgatttcgatttatggcgttttacttgccgcgttgattggcattcccttggggatttttattgcgcaccggaaaaagctcagtaatgttataattggggtagcgaatgtcatccaaacagtgccttcactcgcaatgctctcaatcattatgcttggcttggggcttggcacacgaaccgtcattgcgactgtctttttatactccttgctcccgattatcaaaaatacttacaccggtatggagaatgtttccgataatattatcgattccggaatcgggatgggcatgacaaattggcaactgttacggatggttgaacttcccttatcattggccgtcattatggcggggattcgcaatgccttagtggtcgccatcgggattacagcgattggcgcgtttgttggtgccggcggtttaggcgacatcattattcgcgggaccaacgccactaatggcggcgccttaatcttagctggtgccctgccaaccgccctgatggccattatcgctgatgtgacgttaggctttattcaacgccacttagaagctccacaagcacgaccttaaatctcaacattaggaaggtgtcactatgaaactgtatcaagcattaacccaagtcacactaaacacacaaatggttgacgatttacctgattttcagattacaaccgttttagaccaaccattgaactttgcccctactcagctttaccattatatcgatgccgttttaaagagcggttctcgtcacgatgaaaataacctgttatatgtcacagacgcgatttttatcactgaaaactacaactttaaacaaactgaatttgcggcacttgccacaagcttcgaagaacgggtgacattagcgcgtaaaattgtggccgatctcaaccgccacgtctccgtcaatcttgatttagtgcaacacgaattccaattaatttttgtcgattagcaccactgccctaggcgatgttatttctacatctactggggctttttttattgaaatgaatgaacaggagtcctcactttgccaaatgcacagcgtcaaaatagcgcgctttacaaactcaatcgtcccgccaatcaactaacaccggaacaacaagcactacaagaacaagtcattcaattttgtttggcaaacgcgcacgccgaacacgccaccttcttgattcaaggtgcggccgggactggtaagagcgtgattctcagcagtgtcttcaaggcgttgcagacacttgcgcgccaaacacctacctcgccactctatggcagtcaaaacgtcctattggtcaatcatccagaaatgctaaaattctacaaaagtggcacaacaacggcccccgttttattgaaaaaagattttcaacgcccaacgacattcatcaatcaagcggctaaaaaccaccaacttgccgatatcgtcctcgttgatgaggcacacctactgttaaccaaatccgacccctatagccacttcaatcaaacaaatcaactcgatgaaattcgccgacacagtcggatcaccattctgatttttgatgaacagcaagtgcttaaagtgaagagcttctggcaacagcaacaactccgccaacgaattgaagctgctccccatcagaccgcgcaactaacccatcaatttcggatgcaagcccatccaagtgttgaaaattgggtgcaaacctttcatcaacaacaagtcgctgccctgccacatgatccacactttgaattcaaaatattcaccgatgccaatgagctctatcaaacgattcgctttaaaaaccaaacgagtgggcttgcacgcatgctagctacttacgattttccagcaacactcaatgatggtcacgatcacttcgttgagacatcgacattcaaattacgctgggatcggtatcagccaaccgctaaaacctattgggcagaacgtgaagatagtatagatgaagtcggatccgtgtacaccattcaaggctttgatctcaactatgccggcgtcatcatcgggccatccgtcacgtatgatccacaaagtgagcggctagttattcatcctgaatattacgaggaccaagccgcatttgccggcgcagcacagctggctgatcctgaagccgcgaaacagcaaattattcttaatagcctctacgttctaatgagccgcgctagaaacggcctttacctctatgctgttgatcccgcacttcaggccaaattgctcagcttatgacaaatcgattttatttcccggggaataagtcagttttctgtctatctctatcgaaaacaagtaaactgtaagtagaaattttaaactgataaaggagtgttttaatatgtctaacttaacgagttcatacacgctcacaaacggcgtgcaaattcctaaaattggcttcgggacttggcaaacaccagacggtcaaacagccgtagctgctgttgaagaggcgctcaaggcaggttatcgccacattgataccgcccaagcttacggtaatgaagggagtgttggtgaggccatccaagctagtggcgttgatcgttccgatttattcctaaccaccaaaatctggaatagtaatcacacttatgatttaacaatcagctcttttgaagaatcactcaagaaattacaaaccgactacgttgatttgctcttaatccactggcccaacccaattgcctaccgtgatgattgggaaacagccaacgccgaaacatggcgtgcaatggagatgctctacaaagctggtaaagtccgggccatcggggtcagcaacttccgtgttcgccatttagaagcgctcaaaaagactgcaacggtacaaccaatggtcaaccaactcttcttagcccctggcgaattagaacctgaaactgcccaatactcacgtgaacatggcatgttattagaagcttatagcccacttgggactgggaagattttcagtgtgccagaaatgcaagaattagcggacaaataccaacgctcaattccacaaattgcactacggtggtcattacaacacggcttcttaccattacctaagtctgtgcatgctgaatacatccaacaaaatgcccaagttttcgacttcgaattagccgatgaagacatggctgcaattgatgcacttgacggcgtcgttggacacgcgcaagatcctgatactgcaacattctaaaactgtttaaaagccactaacacagtggcttttttcgatacagatcaacgtcaaaatgtgacaaagcgtattttagtttagatatttaacaatttagtttacctcttccctaaattatggtattttcattattattgaatccgataaaatcggactaaagcccgacgttatttaccgttttaagcttgagaatggtaaaatagaactagttagttaagaaatggggaattattttgtcaagtggtgagttattcactaatctatttgttatgttggtcaccttctttttagccgccttcttcgtggccgctgaatttgcgctcgtccaaacacggccaagtgccttagaagatgccatccattcaggaaatggtaatcctaaaaaattgaatcttgcgcttaaaatgacgcaaaacttaaacgaatatctctcaaccacccaagtgggggtcagtgttgccgggattattttagggtggattggtgaatcaaccgtcgaaaccattctagtcgatctgctcggtctcactcacctgatttcaaatggtggcttacacatcatcggcgcagttgccggcgtgttagtcttaacctatttagaagtggttttcacggaaatcgtgccgaagaatattagtattgatattccaatgcagatgttgatggctgttgctaagcccctccattactgtcatattatcttctatccatttgtttggttactcaacatttccgcaacgggtgttgtgaaattaatcggcttttcacctgctgaagaaggtagtgatgtgctttcccaagcggaaatcattagtctctctaaaaatgccgtcactggtggtgaattagatcgcaacgatttagtttacatgcaacgggcctttgactttaatgaccggattgccaaagatgtgatggttgatcgcacaagtctctacgtcgtcgatatcaccgataccgttaaagacgtcttaaaagactacttacaacaaggctttagccgcttcccagtggttgctgaaaatgataaagacaagattcttggttacgtctacgcatatgatttagtccgtcaggcacaagttgacgattcaatccgcgtcagcaaattactgcgttcgattatctccgttccagaagcaacccctattcacagtttgttgaatcaaatgatcaataagcaaaccccaattgtggtcgtcgttgacgagtacggtgggacgagtgggattgtcactgataaagatatctatgaagaactattcgggaccgtcaaggacgaaattgacgatgtttcagatgaatatatcatcaaagaagacgataaccgttaccgtgtcagtgggaaaacgacgctctatgatttcgaacgtttcttcaagactaaaattgatgccttcgaagcctcagatagcgtgaccctggccggttatgtcttagaaaacttcaccgacttacaacaaagtgcggtcattcatatcaatcaattcacattaaaagtggtcgaattcaatcgcggttacatcgactggtttgaagtctccagcgaaccacaaaataatacagccaacaatacaattattgaaaccaattaaaaaaagagtttgctatcagccatctcctgaggattaacaacaaggagatggctgatagcacatgtttaaacaaaaacagccttgcgcaaatgcgcaaggctgttttttaatttcgttatgctaaataatcacgactccagatgagccccattactttttcgccggtgtgcacgccgaccacaggaccaatgtgactcgtttcaatcggcatccctgggaatgtttccgtcaacgttgcgacccactgcgcactttcttctggattattaccgtcaatcacgctaacgcgtacgggatagtcaacagattcgactgctgctttgaaatctgctaatactttttgaaaggcccgtttcttggtccgttccttcgttaaggcaacaatttggccggcatcgttaaaacttaaaatcggtttaatccgcaaaagattcccgacaaaggccgcactattcgaaatccggcccgttcgcaagaggtggcttaaatcatccacaacgaaataaacgcccatcgttgctcgtaaagctaccaatttcggcatgatagttgcggcatgttcaccttgggcaactaaccgcgccgcttccaaggccaagaacccttcaccggcactcgtaatcttggaatcaaaaggatacacttcgatgccttcaaccgactgtgcgtaggcggttaggttattgacaaagctcgtaatgccacttgaaagatggatacaaatcacttcatcgtagcccgcttttatcaattgatcaaaaacctgttgcatctgacccattgtaatttgcgaagtcgttggtaatttttcagtagtgcgcattttatcgtaaaatgcttcactcgtgatatcgatattttccaaataagtttgttgtccaaaaataacggtgattgggaccacagtaatattatggtcggcggcaacttgtggatctaaatacgccgcactatcagtcacaattgctgttttcatgtcaggctcctcaataaaactgtttttgtcattatcccaccaatgtggataaagtacaaatgaacaacaaaaaacgccggaccactttctgcccgacgccacagttattaatgagtcattgattcattctcaaatacgacaatggagatgtgcccatcaattaagccactgttattactcaaggttaacatttgattcttttcgttaacgtctaatacttcatgttcatcaaagtagccagctgcataatctttgtagtaaacagcccctagatttgattcaaattcatctggataatctttaatgtcagcatccgctggtactaatagcaatctaaagttcgtatccaacgagcaataaccaacgtttgaaaatggaccaacaccatcatctaagtccaataaaattttttgacccggtgtcatcttatccttgattttcgcaactgctgcaggtgttatttttaatgccatatcaatcatccctttcatgcttccagtctaccgccgttttaaatttgacacaatctatctgctcagccagtgtgctacaataggcttaaccgtttatttaaggaggtcattatgcttttttatcggtattcatactttagcaatcagaatgatttcgaattctatctcaaactaagtctgtcagtgatcatcgccagtttaatcatcatcttcttcgttcaatatctccgccaccgttcagattcgaagtaccgtgacttactaatcatcttcggcttagttgggattttactcgccggcattcaatatacacggattcaacagcttaacaccgcccactcgcaacaagctcagatggcgcaattcattagaagtgtggcgactgcgcagaaagctagccttaaaaccgtcgcagtcaacacgacttcgcttcagcaaaacatggtagtgcgcgtcggtcatcaaaactaccaagtcatatttgataacaattttactagttatcaactccaaaaagctcagttgattagccaagacatcacctatcaagattaaggagtttactatgccatcttatttcgatattaccattaaattaattttcggtttcttctgtttagtgttacaaatcaacctctctggcaaggggaatttagcccctagcagtgggattgatcaactccaaaattacgttcttggggggattgttggcggtatgatttataatgccgatatctcgctcttacaattcttactcgttttactcatctggaccttaatcgtcttcacaatgaagtttctaaccactcacaatcgctggattaaacgctgggtaattggtaatccacaaacaattatcaccaacggccacattgatattcaaacggcctctaagaatagtttatccgcacaggatctgtcgtttaaactccgaattgccgggattagcgatattcgcacggtcagtcgcgcaatcttggaacaaaacggacaattaaccattacgcaaaaaggcgacgccacgattaaatatccgctgattatggacggccagattaattcagaagcacttgaattaatcgatcaaactgaagaatggctcctcgccgacattcaacagcaaggctacagtcttcaacaaatctacatggctaactacttgaaccatgaaatcgtgattacgccctattaaaaaagatgacccgcaaaggtcatcttttttaatgtcgtactctttggagaagcgttgcaaccaaccagacaatcgccccgccaattaaaacaatcgtgcttgtcttcaaaccataatccagaacagccaacccatagtcggtaattgtttgattaaaatcgcccgctttttgagcaatttgttcaacaatgccactatatttaaacgcagccgcccctagtgccaagaataagccactccaagcaaaacttgcaccaacactccctaatacataccggaattgaccacttagtccccattgaactagtacaagaacaattcccataataattgcaacccaggttaagatattgatcacatttctaacaaacaacatcttagtcgctaatggtgctaagtaaggtgcttcaatttggttcgtgaggtattcttgtagtggtggttgaaccgcaaccactgccgttttaattaaagattccgtcaacgcattttcaggcacaactgcttctaaatgggctgcaagttgtcccatcatttgtgctgtgggtaacggcttttcttgtcctatataaatattatgaacagttttctttaaatcggcccgcacatcagattgggtcagtaatttgacttgtacttcagttggtagcccatttttttgtgccgcatctaataaaacaacgttaattttatcagtcatcgcagctaacgtcttcggttcactgagctgttcttgcgtaaatgattctctcaaaactgtcaggctgagaatcatgccaccaatgccaaggaaaacgcaaagaaagattaagaacgtcaaaaagcgacttaaacctcgatgtggtcgcacgcttggttgattttgattcaaacgactaattggttccattgattaaacaccctttctattcacgaaccctattaaacttcaagactaggattcttaatcattaaatgctaaagtgaacttatcagtcacaggaggccattcaatgttaaaaaatttaacgattctctatatttcaattgctggtaatacacgttcatttgtaacggatttacaggattatgcggcgcaacaacatgctaataacccagcgttaccaaccattaccctcacagaaatttcggatgcgaccccctttaaagcggagaccgaaccgttttacgcgttcgttccaacttacttagatggtggcaacggcattgataatggcgttaaagaattaatgaccaatagcttaggcgaatacatcgattatgcgcagaacgcacgcctttgttatggagtaatcggtagcgggaaccgcaacttcaacgaacaatattgcttaactgctaaacggtatgcggtacaattcgatgcaccgtttatcgccgattatgagctccgtggcaatgcgaaagatgtcgcgcggatttataccttaatggtcgctaacgcgcaacagcatgcctaaaatttaagattagccggtaatgatgtgattaactcggtgggttgttggacaatttggacagcacccgcctttttgagttccgcgattgtgccaaacccataactaacaccaactgcattcatcgcgttttgcttagcgcccaagatatcattttggcgatcacccaccatcagtaatggtgcggtttgtggcgctagaccaagttctgataatgcgtaagtaatgacatccgcttttttgacccgcgttgtctcatcaacacttgctccaaaaacaccgctaaagtaatcacttaactctaaatgatcaatgaccttcttagcgaatggttctggtttcgaagtcgcaattgccagttgtaaatcctgtgcttgcaatgccgctagggtttctcgcatgccaggataaagttgattttcatacaaccctttaggcgcataataggcttgaaagactttaatagcttcttgagtagcagctgcatttaaaccaaactcacgcataattgtttcattgaggggtggcccaatgaatgtgaccagttcagctttggtttgcgtcggcaatgataactcctcaatcatatattccaaggcgttcacgatgccttcttgcgaatcggctatcgttccatccaaatcaaataaaacggtcccctttgtcatatcaatcatctctcgatctcttataaagtaccttcattttagcatactctttgacccttaaactttccttattgcttttttcataaatctataaacctctggtcacaaaatcttcacaaattcccattatagtattgagtatagaaaagcgaatcttttctatttcatactacttaactttttcattttactcctccaaagtaaaattaaggtagacgcaatctaccacgcacgtattattcccccaaagtaatacgtgtaccccttactcctttttagatcttcggatctgctagaaaccagtctccccaaggctggtttttttgtgtccccatcaaaaaagccgccagagtggacaatttgtccacaacggcttttttatgatgcctatttagcccgtgctgcacggacataatgaataatgagcgtcagtagaataacgccaaacacaattccagcaaacactaggttaggaatttcatagtcaatggctggaatcgacaagaataatttaatcgcgatgaagagaattaagatgtaagccatcggatttaattccggaattttcttcatcaattgggcgatgagttgggcaatcccccgcatgcagataatcccaatcattcccccaattaaaacaatcaccggattactagaaatcgctaaagacgctaatacggaatcaattgaaaaaacaatgtccatcaattcaatcgaagcaactgtgcgccagaaccgatgcggactactgattttagaacccgcctccggtgttttagcctgcttcggatgcccactctttctgaaataagcaatgactaagtaaattaaatacaatgaaccggcaactttaatttcccacaaatgaattaaataggtgccgacaccaataataatgaagcggaaaacataagcgccccataagccatacaccaatgacttttcttgctcaatttttgtaggtaatgtttgtgtctgtgccgctaatacaacagcattgtctactgagagtaagcattccataatcactaacgttaaaattaaaagccaatcttcggacgacgtaatgacagtttgccaattactcagttcaaagaatggttgatacaattgtacaatccaattcatctaaggttcctctatctctaatttctgttatttaattcctgtgactatcttaacgatttttcatgaaaataacaaatttattggttaattatgtaactagtacagcatttttattttataggctctggaaatacggtatactttttgtagcaataattaataatattaatggaggtcgttttcatgattaaagaatttaaagaatttattatgcgtggtaatgtgctagatatggctgtcggggttattttgggggctgctttaaaaagcatcgtggactcattaacaaagaacttaatcaatccaatcatttcattattcgttggacaagttgatctatccggtattgcgcttaccattccaggcaccaaggctgttttcaaaatcgggaacttcctaaacgatgtgattaacttcttaatcatcgcatttgttgtcttcttaatcgtcaaaggattcaacaagcttcgtgacatgggcaagaagaccgaagaagaagaagcacaagtagtcgaaacgaaagaagaagtttacttaaaagaaattcgcgatttattagctaacaaagaaaaataaagtcacaaaaaacgcctgaacaaattgttcaggcgtttttaattgttagcttattgaaatgtgctttctcaaagctaacccattcgagttagcacgcttatcttttaaatctgttttcaaataatggactgactggtttgttttcatggattcgtttgatggcgtccccaataagtggcccgacagaaacttgtaccattttatcgattaatttttcttttggaaggttaattgaatctgtaacaatcatttgcttaatcactgaatcttcgattcgttgaatagctgggccagacaatactggatgtgtacaacatgcgaatacttctgttgcaccagcatctttcaatgcttgcgcagctaacgtaattgtgccggcagtatcaatcatatcatcaatgatgattgcgcgtttaccgttaacattcccgataatattcatcacttcagaaacattcggtcttgggcgacgtttgtcgataattgcgattggtgtctttaagaaatcagctaatttacgagcacgtgtaaccccaccgtgatcgggtgaaacaacaacagcattttcagccaagtcattgctcaagaaataatcagccaataaaggagcacccatcaagtgatccactggaatatcgaagaacccttggatttgtacggcatgtaagtctaatgctaaaattcggttagcccctgccatcgttaacatattagccactaatttagcggtaatcggttcacgtgagcgagccttacgatcttgacgtgcgtaaccataataaggtaacacaacattgattgttttagcagatgcacgacgcaatgcatcaatcataatcatgatttccatcaagttatcattaactggtgcagatgttgattgaataatgaaaatttcgtcgccacgaatactttcttcaatattaatctggatttcaccatcactaaaacgtttaacagaagattttcctaaaggaaccccaacttcagccgcgattttctcagctaagggcttattagagttcaaagcaaagattttcaacttagggtcgaaatattgttcagacatgtcagcctccaaaaatttatgttagtacctatttaaagtttaggcattttcaccccggaaatcaagattaaaacttaaaaagttcacaaatgttgtaaagtaagcgctgttcattagaaacgtgagagaaaaagaaaaagttaatagcgattaccatcgaacctcccgtttagtatcccattatatccccaaaaatgcttgtttattttggattatggattaaattgtcatttagcgcaagacaaggtacactaattgaaaaaggaggttactatgacccgccttaaatacactatttttaataatctctatcttttaattctggtaattattattacttccgatcgcttatttcacctcagcatgccctattttattcttggtcttattctattcgttgccgttttgatttatcagtatcattttttctaccccagtcacccgaactataatcctaaaaattatcgcattacaaaaatgggctgggcaaccaccgctgttgggagtcttatcatacttcttctaatcttattttcaagtggttcaatttggatttggcccgcttttctaatcgccttcttaatacgcgattatttctcaactttaaaataactacaagtatcaaaaaaatcgtccgtaatctcaaaaataagattacggacgatttttattttaagatgtgctttacaacactaagctaatcgtcacaaacacactttaatccaaaacgtgcttcttgtcaccgtaatttccgcttaatctaacatcgtattaatgctcaattactaactgccacagccagcactctattgccattcttcgtcatttgctactggtagttttgcccagtagttttctttgtttgtttgacgggcacgggcgatggccattgccttttctgggacatcatccgtgatggttgagccagctgcaatgaaggtgtgatctgcaatttcaaccggtgcgacaatgtttgagttgctaccgatgaagacatggctgccaacatttgcgtggtgtttagccacgccatcatagttaacaaagactacgccacagccaacattaatatcagtgcctaatgtggcatcgccaacataacttaaatggccaatcttcgtgcgatcgccaattttagcattcttcacttcacagaagttcccaacatggacgtcttcgccaatttcagcgtttgggcgtaaatgactgttaggcccaatgtttgaccccgtgtgcatgatagctgattcaatcgttgaacttgtgatttgaatgttgtcttcaattgttgaatcaataatagttgagccagcaccaacgaaacaatctgaaccaattgttgtgttcccttttaagacgacgttaggttcaacaattgtatcattaccaatctgaacgcccacttcgatataagtattttctggatcaattaatgtcacaccattacgcatgtgttctgtattgatgcgtttacgcatcacttttgttgctgcagcaagagcaactcgatcattaacacccattgattcttcaaagtttggcattctgtaagcagcgacaatttcgccttttttcttcaagatttcaaccacatccgttaagtagtattcaccttgtgcgttctcattcgtcacttcgtgcaaagcttggaataaggtcttgttgtcaaagcaataaacgcccgtattaatttcattaacagccgcttctttatcattagtatctttttgttcaacgattttttcgacaatcccgatatcattccggataatccggccgtaacctgttgggtctggggccgttgctgttaaaatcgttgcctttgcgcctttatcatggtggtatgcaaataatttttcaaaggtttcagcggttaaaagtggcgtatcgccactgaccacaatcgtaatgccatcttcatctttcagtaaagcttcagcttgtaaaaccgcatggccagtccctaattgttcagcttgtaatgcatattgtgaccggtcgccgagataatctttcaccttttcagcgccgtgcccaacaattgtgaccacattggttgggtgcgttctttcaacttgggttaaaacatgatctaccattggtcgaccacaaacctcatgtaatactttatataattttgacttcatgcgagtacctttacccgctgctaaaataattgcatttttattaaccatcataagctcctcgtcattcgtgattactggtctattttagcttaaatactaggctagagcaagctaatccgtattgaagtttagcgctttatcccgtatactggaggtactttattgcggaaggaagtcggccatgccaaaactgacaaacaacattcgattaatgctcggcagcatcattgttgccattgccttactagttggtgggtattggtctacctcagctcggcatcaaacacaccaagccgcagtcacgtcctctaccaaatcacaatcgcatgcgaggcaacaatcgataaaatcaaaaaaagcggctcacccgacaccaattgactggcgtgcgccttccgaaaacaaaccatatcctaatttagacgaacaacccgatttatgggtcgacgtttcaattgcacagcaacgtgtctaccttaaaaatggcaatgatcttttgtacacaatgcatgcttcgaccggttcccctgagtcacccacaccaactggtaccttctatatcgaagctgaacacggcgactcatttttcaatgcaaattccggggaaggtgccaaatattggcgctctttcctagatcatggtatttatctttttcacagtgtgcccacagatgaagctggcaatttcattccagaagaagcagagcaattaggcaaaaaagctaattcacacggctgtatccgtttatcagtagctgatgcccaatggttctataccgcaattccatataatacaaaagtcgtcattcactagcttgaatgacgactttttacttaataacgttcaaaaggagatgccctgatgactcagacaacccaacaaacgattgccacggcttttaaacaattaatggttgaacaaccttttaataaaattagcgtcaccaccatcatgaataaaactggcattcgacgccaaaccttttatgattatttccctgataaatatgcgttattagattggatttacgatcaagaaatcggtgtctacatcgacgagcatctcagctatattcattggacacaggtgttggcgcaactatttaactacttcgatgctaaccgcgccttctatcaaaatgctttgtcgattgaagggcaaaacgccttcgaacgccattttattcatcacgtccatcaactgattaatcggattattcaagatcttgctagcgcccatcacattacgttatccaccgactaccaagcctttttacttagttttctttccaacgcattagttgcttacaccgctgaatggctccgcagtcgtcatccccaatcagtttcaaaagtaatcactgccctaaaaatgacattaactgatacaattaacggtttattattacggacaggacacttatatgaacaacggtaattataagataatcccatcaaaatttaatttcatatttattgaccattcttagcgtagttggcttccacagctgctttttctgcttgccaccagtcttcattgtcacgataccagtcgatggtatgttgtaagcctgacttgaagtcagtgaattctggttgccaacctaattcttcacgtaattttgttgaatcaatcgcgtaacgcaagtcatgaccaggacggtctttcacctgatcgtaagcatctttgggttgccccattaattctaagattaattccaaaacatctttgttgttttgttcgccgtcggcaccgattaaataagtttcaccgattttgcctttggttaaaattgcccaaacggcacttgaatgatcattcgtatgaatccagtcacgcacattttgacctgaaccgtagagttttggtcgaataccacttaaaatattagtaatttgacgaggaataaatttttcaatgtgttggtaaggtccgtagttgtttgagcagtttgagattgtagcttgtaagccgaatgaacggacccaagcacgcactaacaagtctgagctcgcctttgatgatgagtaaggactgcttgggttatagcgcgtttcaggcgtgaatttttcaccaacgccttcgccgtgtcctggtaagtcttcacgcaatggtaaatcaccgtatacttcatcggttgaaacgtgatgataacgcacattatacttccgacaagcttcgatcaacgtatatgaaccgatgatgttcgtttgaataaaaggtgaaggatctttcaaagagttatcattgtgactttcggcagcatagtgtaccactgcgtctgtcttttgaactaacttatcgactaattcagcgtcacagatatcaccaacaactaattccacacggtctgcgggtaaaccggctaagttagcgcgattcccagcgtaagttaatttatctaaaaccgtcacgtgaacttctgggtggttattgaccacatagtgcacgaagttagaaccgataaagccggccccaccagtaacaataatatttttcaacctgaatcctcctaataatatgttaatcatagtattcattcttaatttatttaaatataacagcaatatctatttaatacatagcttaccgtattttaaaatcacattaccgtcctcaacaatattttaaagttattactagttacattattaaaaatcatcttttcttttgaatattattctatataaaaaactgcttaaactcagtctccaaaacagacatcattttaagcagtttttacttcttatttaatcttcaacggtgctaattgggcttcaattgcagctaaatccgtccctgcttgcaacaatgccgctgccgtatagcaaccttcgattaaagcaacatcgtatagatgcaccgttttatccgttagttcttgggccaattcgaggttcatcttagcgctccctaagtcgtagaaggctaacaattcttgcccggcattggcttcaaaagcactttgaatcttcattgcgctagtcccaataccaccttcgtccgtgccaccagcagtcgttactgaaacatcagcggcaacttctttaattaaacgcgctacaccggccgcaatttctggtacgtgagaaacaatcacaacaccatattcactcatgataatacccccgccattaacattgtagtaaataaatacccactagaagccgcccctggatcaacatgtccgattgagcgttcaccgacataagatgcccgacctttggttgcttgcatatctttggtcgattcgacggcagcttcaattgcagccacatctaaagtaccatcttcaaccgctttgacaacgggagcccaaacgtcaatcaacgtcttttcaccaacttgtgcatgtccgcgtttttgaattccttctaaaccggctgccaacaatgggccgacttcaagtgtcgtactgcttagttttgccatttctaaaaaggctgtcccatagagtggaccagaagccccaccaactttgctgatgagcatcatcgcagtcgttttcaaaataccttgtacatcggttggctgttgcttggtcaatgcgtcatgcacagctaacaagccccgcgacatgttattaccgtgatcaccatcaccaatcggtgtatcaagttcacttagataatctttttcagcttggatttttgcatcaaacaattcaagccatttcaatgtattttcaactgttaacatggtatctctcctttaccaaccaatcgttgtgactggttcatctaatttagcaacccaaccaggttcaattaatttcataattgttaatgacacaccggccatatctaaagaggtcatataattgccgacttttgtgaagtcgacttcaacattttcagcggccaagaggtccaagacatcattcataaagacgtattgttccatcagtggtgttgcacctaagccatttaccattaccgcaaaatgttcgccggccgtcatgtggtgggcttcttttaacttgccgactaattcagttgctaggtgtttcgaatcttgtaatttttcacggcgataacctggttcaccgtgaatccctacaccatattcaatctcatcaggcgctaattcaaaccccggttttccgacctcaggaacggttgcgccagataaggcgaccccgattgtcttaatattcggtgtaatttggtgcgctaattcttcaattgcttcgataccagcaccttgacgggcataagcacccagaatcttgtggacgaagattgtccccgcaacaccacggcgtccttgcgtatacgtactattttcaacagcaatgtcgtcatcaacaacgattgagcgaacgtcaatatcatccatagccgccatatccttcgccatttcaaaattcatcacatcgcctgaataattcttaatgactaagaacacaccacggcccgcgtcagctgctttaattgcttcataaatttgatcaggtgttggtgatgtaaagacttgtccgcacacagcggccgtcaacatgccatcgccgacaaaaccagcgtgcgttggttcatgaccactaccgcccccactgacaatcccgacttgtggccgatgttttaaatcggcgattttcatcactgcttctgttcctggaatttgtttgagttggtctggataactccgcactaaaccttggaccatctccgttacaatttggcttggatcattcattatttttttcatagtaacctcctcttaaatataacttcagtctatgttaccgctgtcatttatgcaacggacaaagcttggaaactgtccgaaagcacttcaaataaaaaaagcacccgcacaattaacctgtccgggtgctatcaaatcgtttaagctaagcgatctgcattctttgttaagtaattaccataactgacacttaacgttttattttcaatatcaactttatcaaccttcaagattgatgtgtaatcatcaaccatccgattgccttcgaaatctgattcagcaaagacagaaatgccaaccatttcagaatcaaactcttcaatcaagctcttcatcccattgacggtgccgccgcctttcatgaaatcatcgacaattaagactttggaattttcaggtaagctgcgctttgaaagttccatcttttcgatgcgagctgatgaaccagaaacatagttcacactgaccgttgaaccttcagtaatttttgaatcacggcgcacaattacaaatggcacatttaagtacatcgcaacgctctgtgcgattggaattccctttgttgcaacggtcataacagccgtcacttctttacccacatattggttggcgattaaacgcccaacttgccgtaatacttctggacgtccaagtaagtctgataaatagacgtaaccaccaggtaataagcgatcattttctgaaagccgttgtgccatctcagcgataaaagcttctgcttcatcttgtttaatcattggcatgtagcgcacaccaccagcagcgcccggaaccgtttctaagatccctgtgccacgattaaaaaaggtccgcttcacaattgataaatcttcactgattgatgacttagctgattcgtaacggtttgaaaagaatgtcaatggaatcaacgtatgtggtctttctaataaatagcgtgtcatatcgattaatcgatcgcttcttctaactttcatgttgaatacccctctatatattactttactgttatttccgaaaaaaactgtctaccaatcaattatatagaaatcttcggttaaatcctagtcttttttaaaaaaagagcttaattgttcgcttttatcccattaaagcgattcctacgccaattaaaaacgcctcaaccatttgattgtcggcgttttattatggtttcaatggtttaaccagatatacctcagcgcaaaatccggacatactattataaatccgttgagcccgtgaatactgactacagataccaaataccgttggaccactaccactcatctgagcaacatccgcaccaaactgcaataaccgctcacttaattgcttgataactggataacgttcagtcgtaatcggtgctaaaacattccccatattgcgagtcattgcatttaaatctccagcttcgacggctgcaaccagcgcctcagtttgtggatgctgttgaatctggtcgcaatccaatgcacgaataatccgcggcgtcgaaacactgacttccggtttcacgacaacgacccaaaaattcggtaatgatccgagtggtttgatctgatcgcctttgccagtgacaagggcggtttctccatatacgcaatatggcacatccgaatcaatttgtagccctaatcgcgccaattgttcgcgcgttaaaccaagttgccatagttcgtttaacccccgtaaaacagcggctgcatcagaacttccgccgcctaagccagccgcaactggaatatgcttatcaatttcaattaaagcaccggttggaatctgataggtgtgttgtaataattgagctgctttgtaggccaggttacgctggtcttctggcaaaaagccacttgatgtgcggacctcaattgcgggatcatcgcgtaatgttatctgaacatagtctgccaaatcaatcgacgtcatcaccatctgccactcgggttccccatcgtcatgtagaaagagtgcatctaaactgagattgattttagcaggtgctttttcaattcgttgcatcacattcaccttttacctagcatttaattgtttcattatactcatatctgcttgtaaaaaccaaccttttaacaatgcatctaaaaaagcactgacaatcatctgtcagtgctcttcagtcgatattattgattatcttttaccataatcttatgtctaaattcattcattaaatcaagcatctgcttggcattttccttaccaaacgtctccatccacgaggcaaaccgattatggatcttcggatttaattcttcaactgttttttgaccagacggcgttaaatttaaaatcaaccggcgccgatcatcgggatcaatttcttgtgtaatatagtctaatttaagtaaaacacgaatctgtcgagaaattgcaccgcgtgttacgcctcgttttttagcaatatcaattagactcactgaattatcatcagcaatctctttcataatcagatattgttcaaaagacaattggtaagcttgcgttggttcagaaaccaagtcttcgacatatttaatcgccgacatgtaaagttcaacgtattcatccaacaattgactatctttcacaatatttcccacctttttatttattttcttaactgtaccacaaatctttaagcttgactatttggtgtttgcgttaacttttgttttaactctccgccgaacaaaccggcgaagaacactgcacaaaagatcaccaagacgattaagactaaccaaagttgtgaaccattgccgttgacaacttgttcgaacccactaatcgtgtaagtccctggcaagaagattgccacaccacgatagaagcctgaaagcatgtcattcgggaagagtccccctgtaatgatgagttgtaagaacaataacccgaaggccattaaaattcccatcgttccaaaaagtttatccaatgctaaacatgcaagggtaaagaccgcactcgtcatcatacttaagacgaagaatgcgaacggttgtgcaatcgtcaatccaaaaaggtttgcaaagatatcaattaataaggcttgtgcgacaactacgccagctacaaccaacatccgttgcttaagaccgctatgtgccaatgtttcaccatagcgataaagtgttaattgcgtcaacattgccccaacaaagaagacaagtgttaagactaatggcgagaaggtattaattaatgcgccatgatttgtatctgatagtaattgatctttgactggttgcacgaaatgttctacatttgcggaacctgttgaaagattggcaacttgcttgctaccatcgattaacttgacgtttaataagctaatcccagcacccgcttggcctaagccagtcgttaattgtccagcaccatctgccaataagcctgaaccctcgttaatttgtgtaatgccagaaacaagcgttggtgctttttggtttaattcttgtagaccatttgttagctgttgtccgccggcattaagcttgttgttattcgcgactaattgattgctccccgcagctgcagtcgaaacaccattcagataagtcgttaagcctgacattaaaccaagttgaccagctttcccttttagaccatcttgaatctgaaccaagccggcatgaatcatgtcagcagcttgaattccgcccattgtataggtcgtatttcctttttgtttcaacccagtgtcgactttggctaaccccgctgtcagtgtatcaatcgcctgagtagcaccatttagtgctaacggcgcttggtcttggcttgccatcttcgcgattccggcttttagttgtgccatgttatcagccgtttttgttaattcatctgaaacagcctgtagttgaacaccagtatcactcatgttgctgcccatcgtgcctaagttggcttgaatagccttcatgttcgtgccagaagactctaactgactgccagcattcagcaagtctgcttttgctgcatctccaatatccagcaacgctttcaaaatagttggattctgaattaaaaactttgcaaacttaccgttagttaccgctaaatcttgtaaggcttttagttgatttcctgcatcttgtaaactgtttgcaacactatcaggtttagcagtattgtacactttatcgttaatctgacttaaattcgcaccactatcctgtaaaagtgcccctgtattttttgtattatccgcaatctttaataagtctgctttgataatttcggaattatcattattggaatgattcactttttgatctaactcttgaataccagcatttaaagcgcctaaaccagctttcaattgtgttaattggtcttgattaccatctaaactggattcaattccatcggctgcttcagttagttttgcactcaactgcttagtgccatcagctaattggtcgacaccgccactgatttgttggccaccagctaaaattgtttggttattggctgctagttggtttaaaccggcattaatttgaccggcgccagctgtataatctccaagcccagccgaaagttgcccagcaccagttgttaattgttgcacgccacttgccaatggcgcactaccatctgccaattgttgtgtcccactatgcaacacatttaaattatcatagatttgttggctcccatttgataattgaccggctgctgtgtttaactttttaacgccattgctagcttcttgtacgccactgcctagcgtgccgattgcaccaagcaaggcttgattataagcttcttgaattttttgaacgacactgcccttcatttggttcacgacttgggttgtaatcatgccggccatgtagttatttttcttagacgtttcaacttttaacaagctgactttaggtgacttatctaacgcggttgtcgcatttttagaaaagtctttcggtaagacaacctgcatcgcgtatcggccgctagctaagttcgcttttgcatccttagcactgacaaattgccaatcaacctggtgatcattacgcaacgtttttagtacctgttgcccaactgccaccttttcccctttaaatgttgcggattgatcttgattcacaaccgcgactttcatatgtttaatattagtggtctgttcgtacttaataaaattaaatgtgattagtaatagtaaaatcggaattaagcagaccataataatgaacccacctaacttcactttgttctctttccaattgccaaacatattctttctcccttttatatacgtcataaacattctatatgatattgttttatcaaacgaatgtcaacaactaatcaaccacgtgaagtatatggcgattcgtcaatctgctttttgaacaaaaaaagcactcaaccagttggttgagtgctactctattcttctattttaaactataggacaattggttcttcatcaaactcaatctcaatcgatttcgttaacaaatcagcatagctgtatgaaacacgttcaaaagcattttcatcctgatctaaatcgactacaaatactgctggaaaggtttctttaagaattccctttcgctttgtaacttttttgcgcccagcttgagcgacaaccattaacttgtctccgatatgcccatcgagaccgttcttaatattggcaagtgtggttggcattatgcttcacctcttcgagggatagtataccatataaacgaaaaatttgcaattataccattgtaccaacgatttggcaattacttacttagcttttttagcaaaaattggctgattattcagcgcatcgcttaattgggcaaattgttggatactcaattgttcagcacgagcgctcggtgcaatctcgactgcttctaaggctgttgttaaagctgctttgacttcatcttgtttaccaaattgattttgcaagttattccataatgtctttcggcgttgtgcaaatgcgccacgaaccaattgatcaaataaggtttgattatcaaccgttacaagtggtgctttgcgccccactaattcaacaatcgctgaatcaacattcggttgtggcataaaggctgtcttgggcacaataaaggctaagttcacttctgaatgaagttgaacggcgatacttaatgagccgtaagcctttgaacctggttcagcgttgattcgttctgccacttccttttgcatcattaagaccatgcgatcaattggcaagcctgcttctagtaagtgcaacataatcggcgttgtgatgtagtagggtaagttcgcaacgattttgagattatgcttaccattaaattgttcggcgataatcgtttttaaatccgcttcaagaatatcttggtttaaaatcgtgacgttatggtagtgattcaaagtatcttttaagaccggcattaaccgttcatcaatttcaaaacttaatacttgatgcgcttttctggcaatttgttccgttaaagaaccgatcccggggccgatttcaatcacatcgtcatctttggtgatatcaccagcttcaacaatttgtttcaaaatggcgatgttggttaagaagttttggcctaagctctttttaaacttaaagccgtaacgtttgagaattttccgggtacgctcgggatttgcaatatcttccatattaatctcctaattcctgtttaatttgtaatagtgcagcgccaaattcagcttgcgtcacttggaacatcttgagacgcttgtaaagttgtttgctgttggtgtaaccaatgtgcaaaatttcgccgagtaattcgcgccgtcgctttgaatcagcccccgcaatcaagcccgccgttaataaatccgattgactgatttgttcgtctgcttcttcatcttgtgttaatagatgctcaagtgcttggacaatcgccgctggttttgcgtgttcaatgcctaaactgccgcctgctttttccggacgtgcttctgtccgtggtaaaaaggcgtgttcgacgcccggtacattttgagagatgattttacgaatcttctcgccatgaaaatcgggatcggtaaagacaatgaccccgcgtttttcttgagcgagcgcaattttttcgataatttcttcattgattgctgaaccgcgcgtttcgattgtcgaaacatctgggaaaacttcccgtaaccgcttcgtatcgtcgcgcccttcaacaacaatcacttcttgaattgtttttttcatagtgctcctaacttaaaaatccggtgggcattcgcatacgtcgctgccgcaatttcttctggtgccacatctctgagtttagcaatcgcttctaccacataccgtgtgtagcctggttgattctgcttaccacgataaggcgtcggcgttaaataaggtgcgtccgtttcaaccaacatcacgtccaatggacatgctttagctgcttcatggacttcatgcgcatttttaaaactgaccacaccgctgaacgaaatctgcataccaagatccataaaccgtttcatccattcaacatcgccattaaaactgtggataatccccccacaatcacggacatctgtttcttttagaatcttgtacgtatcttctaacgcgtcccgcgtgtgcactgaaattggcatatgcaaggatttagcaatctcgatttgccgtgcaaaaacggtttgttgcacatcgcgtggcgaagtatcccaatgataatccaaaccaatttcacctagcgccactacttctggtcgttgtaattggtcaatcagcacggtttcttctgccttgtgataatctttggctgattcagggtgccaaccgataatggctgataaaggttcatattgcgctgctaagcgcaaagcgccctcatttaatactgtatctgaaccaacaatcgccatttcaacaacaccgagttcagcggcttgcgcgataaaatcagcttcttgccctgcatatggggtatcattcaaatgcgtatgtgaatcaaaaatttgcatttcaatctccttttagtgtcctcattctgacagttaaaacgtgctcttgccagtagctttctgtgctttgttacactttcaaaccggcgattccatcgccaattcgccaagttagacaaatgctcaaaagctaaccactggcaacacactcttttccattaaaaaggctaaaaggcctacagaatgtaaatgccttttagcccttttgacgtttctgttattttaaattaaccgatttgtgagccgttcaccaagttgtttggcacaactgctaattcaacttgtccgtcatgttctgctgataacaacatcccttggctcaattcgccacgcaatttacgtggtttcaagttcgtgacggctaagactttcttaccgactaacgcttcatagtctggatagaattcagcaatgccggaaacgatttggcgatcaccttgatccccagcatctagacggaatttcaatagtttatcagcgccttcaaccttggcaactgccttaatttcagcaacgcgaatttcggtttgatcgaaatcttcaaacttgatggcgtccttttcactgactaatgttgttgcttttggatcgaattcagctttggcttcagctgcttgttgcttagccttcactttttcgttcactaagcccgctttttgcgcttgacccatttgatccttaatatatgcgacttcttcatccaagtctaaacgtgggaagattggggtccctttagcaaccacttgaatattggctgggaatgtcccataaaccaattcacgttgcgcaacttgatcgaaatcaagccctaattgtgcaaacatatcacgtggtgcatgcgtcatcacaggttgtaataagagcgcaacaatccgtaaactctcagccaagtgggctaagacactatcgagttccgctttgcggctgtcatcttttgccaagacccatggttctgtttcatcgatgtacttattcgcccggctgattaattgccaaacggtatctaaggcatcagagaacttcaattgatccattaagctggtatattgttcgatggtttgtgcggctgtcttttgtaagtcagcatcaaacggtgtcacgtcagcttggtaagctggcacagcgccattgtcgtacttgttaatcatcgcaatggtccggttcaacaagtttcctaagtcgttggcaagatcgtagttaatccggctgacaaagtcttccggtgtaaatgtcccatcattaccaaatggaatcgcgcgcattaaatagtaacgtaaagcatctagaccataacgttccactaacatttcaggataaactacgttgccttttgatttagacattttaccgtctttcatcaacaaccaaccatgaccaaaaatttgttttggtaatggcaagtctagagccatcaagaagattggccaataaatcgtatggaatcgtacgatttctttcccaactagatgcacatcagcaggccagtatttattaaacaattcgtcgttgtctgaaccgtacccaagcgctgtgatatagtttgataacgcatctaaccacacgtaaaccacgtgcttcggattacttgaaacgtgaattccccagtcaaatgagattcgagaaaccgataagtcttccaaaccaggtttgatgaagttattgatcatttcattacgccgtgacgccggttcgatgaaatctgggtgttcttcataataagccaataagcgatcagcatacttgctcatcttaaacttgtaagtttcttcagcgacccgttgaacttcatgaccagatggggctttcccaccgatcacattgccatcgtcgtctttataaacttctgctaattgtgattcagtgaagtattcttcatcagaaacagaataccaaccttcgtatttaccaagatagatatcgccttgcgctaataacttgtcgaagattttttgaaccgctttgacatggtattcatccgttgtccgaataaatttgtcatttgaaatttcaagagtttgccataatgccttgatgtctttagccatgccatcaacatattcttgtggggctaaatgcttttcagctgctttttgttcgagtttcaagccgtgttcgtccgtccccgtcaagaagaagacatcaaagcccatcaagcgtttataacgcgcgatgacatcggcggcgattgttgtatatgagttaccaatcgttaatttaccagatggataatagattggggtcgttacgtaaaatgttggttttgtctctgccattaggttcgctccttaattaaaaaaacgagaatcttaacaattctcgacttgcttaaataatgccatataagtaatcaaagtatagcacaaaagagcagtcatttaaacgacaactcacactaagccttcattaaaataaatcaatctgttcaggcgctttcggggctaaatcaggaaattctagcccaagtaattgttgtaattgcaaagcattatccgcagcatccccaccagaattattgttaaaaatcacggcaacttgttccgcttgatttttaatctgccgcacagcatccgcaaaaaattgtaattcatcttgatcatagcgatacaatgttcgttgcttccgccattgggcacccggattctgccacccggccatattacgaccatgcaggcgcaacatcgcaaacgccggattggtgacaaccggttcaaacggcacactgttcgtcggtgtttgtgcttcgtctgtgatgacgtgtgtcatgtttagctgcttcaaaaaggcgtacatctgttgcttaaaagcgtcatcgtaccaggattgatgccggaattcgacagcaattggcacatccggtaaccacgcgcgaatttgtcgtaaatattgactattttcctgattcagttgaaaaaatggcggaaactgaaataagaccgcctgtaattggccggccttaattagcggttcaattgattggcgataccgcacaaacaattctttttcagtactcgtaaactcggcgtagtcttcttggcgggtcattgcttggtgtgctttaacaatgaactgaaaactggctggtacttgcgtcaaccagtttgcgctgacggttggtgcgcgtaagccgtaataaaaactatcgacctccaccactggcagaaattgcgcgtagtcgtttaatgttaactgctttttgctgggcattaatgactgatgttctgaccaagtagttaatccaattgttatcatatccacacctctagaaccgttggaattgttgaatgaacaaagcttcttgttccgttaaatccttcaatgtgacaattaattgttgtcccatgcgtttataatttaaccgaatccgcgataggctaaagtcgatgactagcagcagcaacattaagctaatggcgcgcccctcagaaaacgccacccctaaaagctgtaccttgcccgttgcagttaagaatttaaaaataatgtataacgagaacagttcttcgacgactctaaaaaaacgaatcccttgcaacttcttctttaaaaccatcaagaccatcatcgtttggtcctttgtcatcatagtgcttcctctccttctcttggttcagtaatgggaattgcttcaaagaaaatcatctgatctgcatgaaaatccgtgtcataccgattgagctgaccgcttaaaacagttggtaaaatggcctgtaagtctgccacaattccttgattatcagcagcttgtgcccattctggttcaaataattgaagcacgccttcgcgcattccgaccggataaagtggtagttgcaccgttggtaaaatatcgactaaaaaaatgtcaatcggtgcaatcggttcaccatcgatgtgccaatcaatccaccccgcattttggagtgtgtattggttggtttgtaaacccgtttcttcaaataactcccgttgcataccactgattggcgtctcatcagtttctgttttaccaccaatgccattccaaagcccagcaaatgggggcttaatccgattcaataatagtaaagtcccgcgatagcgaattaccgctaaattatagcgtcgtttagtcacagttcaatagcctcacatctcataaattagtttcattttagcatattaagcaaaagagtgctgactgtcgcggttagcaattgagcattaattcaaaaatggtattaatccaggggtttaggattaataccatttttagattaagcggaaattactgcgacaggaagcacgtttagagtgtctgagtcaaacgggttggctttgaggattaacaaaaaatagggattatggcgcccttcagccatgatttccctttttaggttaaccggaaaaggcagttcgaatcggcacgtttcaaatcagagtgctgaatctgccggttatatcttgatgattagcagcgcatcgtgaatgagcgacgaagtcgattgtttgcgatacatagctaaccggaaagatatagcagactcggcacgtttagagtgtctgagtcgaacgggttggctttgaggattaacaaaaaaatggggattatggcgctcttcagccatgattgccatttttaggttaaccggaaaaggcagttcgaatcggcacgtttcaatcaaaaaagagcgctccgtctccgtttcgctctttccacattatttttcttctgcttctttcatcgccttcatcaattttacttgatattgtttcgaaattaaaattaacgtttggtataaatcccttacgtaatctgcgagtgctggatctttaaccgcagcaaggcgcgcatccatcaccgctttttcgcgttggatgtccgtcaagccgattttttgttcatgcttgattgttgcaatttgcttggtgacttgcatgcgttcttcaaataaaaccgccaattgggcatcaattgcatcaattttttgatagtgttcagttaacatgggctcactccttagttgctagtgcggcaaaaacggttgtcgcatccgcttgtatcatagtgactggcatttcaaattgtaatgcctcttgattaatcgctactaattgggcatctggacggcgatattcaattaaactcgcaaatgggtacacacgaaatgacgtcccgaccacgacaattaaatccgccgcttcaatcgcctgaatcgaccgttcaatcaccgtcggatcaatcggttcttcatataaaacgatatttggtcgcaaaatcccaccacaatcttgatgatgcatatcctttaaataggcctgataaggcactgattggccacacttttggcagctgacacggtataaactaccatgaaattcaatcacatcccgcgcgcctgcttttgtgtgcaacccatcaacattttgggtgataatctgccccttttgattcgcaatcgtcgccatcacttggtgaatgacattggggtttgcttcaggaaaatacatctgctgcgtgacaaattcataaaaactggctggattggtgattaaattcgtgtgacttaataaatattctggattggcttgctgatgatacaaccccgttttcgatcgataatctggaatgccagaagccgttgacacgcccgcacccgtcaagaaaacaacatgctgtgccgcatgcaacattgatttaaaagtcatcaccatcactcctttttaacgtgcttttaattcgcagctttctgcgctttgctacatcagtcggccaatcgcctttggcgcttatccgtctgattaggcaagtgctcaaaagctaaccgcgaattaacgcactctgttctttaacgtgcttttcaagctaactttctgtgcttagcactgtgaatcaaatcatcgactgcgtcgctaattcgcttccctgtgctaatgctcaaaagttgaccagcttgaacgcactcattttcttaatgaatacggcattccaatttcatctaagaaggtttgcactgataaatcatacaatcgtttgaaatattccggtgttgccttgtcttctggaatccctaagacaaaagcattttgttgatcactcttaccaattccaacatacgctttttggttcattgcggtcgcaaatagattttcggaatgtaaaatatcgtagacttggcgcacttctaatcgtagttgccgttcacttaataccggcgttaatgtcaagagttgttggaggttcgtttcagcaaatcctagggttgataacacgcgatcaaacgcaacccacaagttaatcacagcccgccgtaatgtgaatggtgaatcaattgttttgcgtgccaacacatgatagagaatttcggcttgggcaaacgcaatcggataatcagccgtccactgttttaacagttgttggttgccaccatcaaagaagacgagggcatctaacagcgttaatacgcggaaaatcacccatctattttcgggatcgtctttttccggggtcagattatctcgtagaccttcaaggtaggcttgtttagtttcaacatccacaaagccatgggattcttgttctttttgaatcaccatgtgcacagcggcattgtacaaagttgtgccggtcgcaaccaattgttcatcaagttgcgcatcctgcgtggtgacatcggtcatgatttgtggaaaaccgattgataataatagtaagtgcaataattcgtgtgatagagcataatcagccgctgtcgcatcggtaattaagattgccaagctgccatcgttatttaaaacgcgttgtgcctgatcatgttttaacatcccagacgctgcgtctgcgacccggatcttaatgggttgaggataattcttttgaacttggtcaattaaactttggatttctggggaaaattcagtagttgtcatttttggtctcctttgagtaaacagctttgcttttcatgataagccaaatccagttaaattaccaacggtttagaatgtatgaaagcggttaaaactgttataataaaggtaatcttaatttaaaggacgtgttgactatgacagaaccaaattcgcgaaaagtaattttataccttgctcagagtctagatggcttcatcgctgaaaaagatggtagcactgcttggttagctgcactcgattcatccgaatcagacgctgcaattcaagctttccaacgcaccgtcgataccgttgtgatggggcgtaagacatatgaacaaagtcttaaattagccggcacctatccttaccaagataaaaacggctatgtcttctcgaaaacgttacatgatacagaagatcgaacacatgtcgttgctgggaatattcctgagttcatgcgtcaattaaaaaaagaagatggtggcaatatctggcttgtgggtggtgcagaaatctttaccgaattgcttaaagcccagttagtcgatgaactcatcatcaccattgcgccagttctcctgggtgacggcatttcactggtcagcacgcacttaaccgatatgccattggaacttatcaatagccgtcaaatcggtcattttgttgaattgacatacaagattaattattaaaaatcaaacgaaaaggcagccacaatattttgtcgctgccttttcagattaaagtacgggggaatgaccaatgaaagccaaccttaaaatcccacttattttattcatcgctttatgtatcagcggcctctgccagctgttgcaccaagatttcttcgctgtgcttgtgatgctcatcgcaacaatcagttgtctgataattgcctttaaaaaccggcaagctagcggacgttaattcgcaacgcgctcataatcacgagcgtctgttctgtgctgatggtcgccccacgtaataattcgagcgtgaaagtcgctttttcgaattgattctgactgatatcgagattcttcaaattcgtgccagtcatatccatgccgttcaaacgattcccgatcattgttagccactgccaatcaacttgcccgagtgagacttcttgcatactgcaatctttaaagtcgacatgccgcatccgcgcaaagttaaagccggtgtaatccgcttggcaagtgtcgaacgtgacatcattcagaccagcctctgcaaaatcggaaccaatcaactggcaaccattaaacgcgactcgttggaagggagcattcgtcaacgaacagtttaacaacgcgcagtgttcgaattgcacatcttgaaaatcacagttattaaagtcgacttgttcaaactgacaatttttaaataaacagcctttaaagaataacatctcaacttcggtttgcttcaacgttagttcttcgaaaaacaaaccttcataagtctcatctggttcaaacgcagtaagctgtaccgtctcaagttgtggatttagccgcggtgcctgtgctttcttatctgtcatctaactgtctcctgtctattgtgattagtataccgaaaattgtcgccagtgacgacctgaaattcaggaaagccttttcttttcattaatggtactttgtggtaggttaaaagcatcaaataaaaggagtgattgatagtgcaaaaaatcaatgttggtggcagcggcttaatggcttcgccaattgtctggggtgtcatgcgcatcccacaactgagcgaccaagaagccctgacaatgctcgaaaccgcctatgaacatgggattaattactttgataacgctgatatttacggcgatggtgcttccgaaattaaattcgggaacgcccttaaggccagtcatattgaccgtgatcaagtgctcgttcaaaccaaagtcggcattggcaaaaaaatgtacgacttttcaaaggaacacatcatcgaaggtgttgaagccagcctcaaccgattacaacttgatcatgttgacaccttactgctccaccgacctgatccactcatggaaccggatgaaatcgctgaagccttcttaaaattgcaaaatagtggtaaagtccgccaattcggggtcagcaacttcaatcccggtcaagtcgacttactccaacaagcagtgccgcaagcattgattgctaatcaactccaattcagtttgatgcacactggtatgattgatgccggcgtgcataccaatatgcaagacgcgcgcagcattcatcacgatggtggtttattagaatactcacgcctcacgaatatgaccattcaagcatggagtccttatcaatacggcatgtttgaaggggtcttcatcgataatccgaaatttccagaattaaacgcagcactccaatcagttgccaaggcacatgacaccaacgtcaacgcaattgctagcgcatggctcctcagaattccagccagcatgcaagtcgttgtcggcacaatgaaccccggccgcctagcacaaatctgcgaagcaggcaaagtcaccctcaccagaagagaatggtacgacctatacttggcagcaggcaatgacctgccataaagtgctgagatagccgtttatcacttgaagattagcctatcaccaggaattatggtggtttccggccatgatttttgttgtgtagtgaaccggaaggttatggctatcgaagcatgtttaaagtacgtttaaaacggttagtttctaagtaagtagtaattgtgcattaagcaaaaaaagcgccgtctcaattaatcttgagacggcgctttttttggttctacttaattctgataaggattgcctgcatactgatccaccaccgccatcgatccatcgtaatggccgcgaccggttgcatagtcaaattgcatcttaggttgtacattccaaacatacgcattaaagttcaacttcttatctgttgagattgcttgaacccagtaaccgcggggcatcaattcatctccacggaacacagttgtcacttggtaaatcacctttttattttgcgttagtgcttggcgaacctggtcttcaaaaatctgcatggtacgttgattgctgaagaccgtttgtgtcgctaagttcttcggattattgctactgccgagttcccctttttggaaaacaccatctcggttgaaattaaacgaaatcgcgtatgcaatcaaatggccgcgactttcaggaaagacccgttggccatcaatcatcacgggttgattatgccagccggttggttgccacgtttgacgatggcgtgtgtttgaacggcctaacgtctctttcgataagaaagccgtattagtcgttgtccgatttaaaccatccaacgcaccatacttgatccgttcggtttgccattgacggacatccaacgttgatttattatggttcacttctaaataggcattgtcgcctgacttaaaggtcttctcagccaagattgccgttgtttttttaacttgttttttatttgcaattgttggtgcattctcgtgcgttggttgactagattgtgtcgcctgacagccacccaacgccaacatggtcaacgataagccgaccaataaatactttttaaacatcctgttcctccctattcttacctgcttcacgacgcttcagttggtgcattgtcttgaaataggaactcaatagcaccaaacatgaaccaatccaagcgagtgggttggctaaacttgcgcccatgaagccgaattgctgcacgaggaagatcccggcaaaaatccgcatgaacaactccgcaatccccgctaaggttggaataaagctctgccccaaaccttgcaaggtgtagcgaatggcaaataagattgccaaaataaagtaacaactactgttaaagcggaagtagatttgtgctaaatccgtcacgtacggttgattgttcccgataaacaggttaaccagtggtcgtccaaaggcaatgatcaacgcgcccatcactaaactaaagatgattgacaccattagtgtctggcggacccctttactgattcgtccaaattcacgtgcaccgtaattttgtgcggaatatgtcgccaaggtaatcccaaatgaattcccaacttgagttgctaattgatcaatcttcccagccgctgtgtaagcagcaaccgcgctagcacccaatgtattcaacatgatttggatcacgattgagccaattgcaataattgacgattgaaagcccatcggcaatccaaccttgagatgatccatgacatctttgcgcgtcacgcgaaaatccttcggccgtaaaacgaggaccggaatgcggcgataaatatatagtaagcataacacagccgcaattatttgtgcagagaccgtcgcaaacccggccccttcaacgcccatatgaaagcctaaaataaaaataaaatctaacacaatattcacaatgaccccaattactaagaaaaagaggggggttcgactatccccaagtgcgcgaatgatattcgaaagtaagttaaacgccatcgaggcaaaaatcccaccaaagataatcataataaaccgttgagcatcaacaatgatgctggccggcgtcttcatcatgaccaaaatatgtcgagcaaataatagactaataactgtcaaaatgatggttatcaccaaactaatcagaatgctcgtcgcaaagctgcgcttaacgccgcgatagtcttgagcaccatagcgttgggctgtcaagatggacaacccagccgtggtccctgtacaaaaaccgataatcagcatgttcaatccacccgttgagccaactgctgctaacgcattaacaccaattgtccgcccaacgattaaggtatcgatgacactatagagttgctgaaaaatattcccaatcaataatgggccggtaaataagataattaatttcaacggattacctttagttaaatcatgcatatcaattctcctttgctccatgttgataacttctcaaattatacaccaaaaacagcgtttacatctgtcttaaattgagttaagtctctcatattcaactttaaagtaccatcaaaaagcatctattatcccactatattagtctataaaaaaacagttaaacaagtcattcagcgacttgtttaactgtttttttaatttgaataggattagttaaagtaattaatccccattgcatcccgcacttctttaagggtttgttctgcaacagcattggccttcttgctaccttcttctaacatcttataaacggcttctggattcttttcaaattcagcacgacgttcacgaatgggtgcgaacttcgcttgtaagacttcgttcaagtaacgtttgatcttcacatcacccaaaccaccagcttgatattgcgctttgagttcagccactttttcacgatcatcatcgaaggcatctaaataggtaaagactgtgttgccttcaatgtgaccaggatcggttactttgatatgcaatggatcagtgtacattgacatcactttcttttcaagcgtttgggcatcgtctgataggtaaatcgcattgcctaatgacttactcatcttggcgttcccatctaaaccaggtaggcgtccttcgccttttggtgggaagaccccttctggttcagctaaaatttcttgtccgtaaacgttgttaaacgtccgtacgatttcacgggtttgttccaacattggttcttgatcatcaccaacaggaactgtcgttgctttgaacgccgtgatatcagcagcttggctgactggataaattaaaaagcccgctggaatactttgttcaaaattcttttgttggatttcagctttaacggttggattgcgttgtaaacgcgaaaccgtcacaaggttcaaataatgcatcgttaattcactcaaagcaggaatttgtgattgcacgaagacggttgttttagcgggatcaatcccaactgataaataatccaaagccacttggaagagactgttccggattttttcaggatcacgcgcattatcggttaaagcttgttgatcggcaatcatgataaatgtttcgtattcgcctgaatcttgcatcgctacccggttgcgtaatgaaccaatgtaatgcccaatgtgtaatttaccggttggtcgatcgccggttaagataatttttttgttcataataataccctccaatttgatttatcaactcaaaaaaagcgtcctaattgtgattaaacaattaggacgcctctacgtggtaccacctaaattgcacgaaaatcatccgtgccactcacgcgataagggtgctacccgaattagttactcactaattcccgattgaaggcccaattcacaaccaactccttgacgacttctcagtcccgccgcttcctgttcaagaaaatatcagttgctacttatccttcactttgtctgttgaattactgtcatactaacggattttaaaatgaatgtcaatcggtcgcttttttaccccaagacgcttataatataacaactaacaattggaggctgctatgttacacgaagacacaaaacaacaagaacaagcgcgcgttgaccgcacagttatacaggtcgaccaacgcctcacagtgattaaccaacaattggccaacgcctacaatgaaaccaaagacatcgaacaacgttacggcgacaatacgaaagtcaacattaccgaagtcgatgaccgcatggaaaccaacgccgcggtccaacaacaaaagcaattggtcgccgccgctgtcgaaaacgaaaaattactgactagccaacaagaacgcctgaccgatctcgtcaactccccttacttcggtcggattgacatcaccgaagatggtgaaacggaatcactctacatcgggaccgccacttttatcgacgaccaagacaatttcttaatctacgactggcgcgcccctgtttcgagtatctactataatgggacactcggtccagtgacttatgagacgccaaatggccctgtcaaagttgacctcaaactcaaacgccaattcaagattcaaaacggtcaaatcgaacacgtctttgatacgaacgaaactgtcggcgatgaactcttacaagccgtcctcggtgaacaaagtgacgaatacatgcaaaacatcgttgccacgattcaaaaagaacaaaatgatatcattcgcgatacaaccgctgacttactgattgtccaaggggtcgccggtagtggtaaaacctcagctgtcttgcaacgcatcgcctttttactctatcacagccgcagtcagctcgaagccgaccaaatggtgctcttctcacccaaccgtttattcagccattatatttcagaagtcctgcctagtttaggcgagaaaaacatgcgccaagtgacgatggccgagttcttaagtcatcgcttctcaggcttacaggttgagaacctcttcgaccgcttcgaaaaagatcaagccagttttcctgaaatgacacaagccatgcgccggtataaagaaagcgcagcgttcatgcacgcaattgaagcttacgttaaacaagcctcaacccaaccgttggcattcaacgatctatacttcgaagaccgcccattttttactaaagaccagatgaatcagatttatctcgcgctccccgcaaatatgttacccggcgacaaattcctcgccactaaaaacacgctcatcaaacggcttaaacgccaaatcaacctcgaagttcatctcgactgggtcgctgaaaaaatcgataccttaaccgatgatgcttaccggacgattgtcggtgaccgcgaattcgattctggcgatgatgaacaagctttcatcgctcgtgaaatcgttcaaagttatttcgccccactctatgaatcaatctacaatgattatttcctagatgaatccacagaatatcaacacttcttaagtggtgcttgccctgccgacatccctacgaaggtttgggacgccatgattcgccaagtcgcggataacaatgaacgccacatcgtcgggctcagtgacgccgccccaattctatacctgcgcgacttattaactgacagcggccaaaatcacggcattcagtacctcttcatcgatgaaatgcaggattacagcatcgctcagttcgtctacatccaccacgcctttcccaacgcgaaattaaccgtgctcggcgattacgcacaggatgtcttcacggcgacctaccaaaccggccacttcatcgatcaactgaccgctgcttttccccgcttaaaaatcaaccaaattagcttaaccaagagttaccgcgcgaccgccccaatcaccaacttcgccaaggcactcttgccaaaagaaacagccctccaagccttcagccgtgacgggcgcctaccgcgcgtcattgagacgccaaacgaccaagcgctcgctacactgacccaagaaatccgccatctccaggcagaacacgcgaccgttgcgatcctcaccaagaaccaacaagttgcccaccaactctacgctagtttaacacctgatgaacacgtcacactcatcggtgaaacaacccgtagtttacccaaaggcatcctaatccttccattatatttagccaaagggctcgagttcgacgctgtgattggctacgacatctctaagaagaccttcggcgcacaatcagacgtagatctcctctacacactcgtcacacgtgctatgcacgatttaacactgattggcgtggatcagctcagtccgttgatagtggcactgccgacggacatctatactaccttacaatcaactaagcaatccatttaagcaaaaaagcctgtcgaaattatcgacaggctttttgaattcgtattttatgcaccgtatggaaaatccaaaccagggactgcatttaaacttagatcagcaaattgttgtttttgtaattcgatatgcgctgcggccccgatcatggcgccgttatcgccgcataatcgaagtggtggcatgatgaggtctaaatccattccggatgccttaatggctgtcgccaaaccttcacgtaaaccttgattggcagccaccccaccggccacaacgagttggcgcacgtttaattgacgcgcggcgtgcatcgttttagtggtgagcacttcgaccacactcgcttggaaactagcggctaagtcttcgtggttcagcgtctcaccgatttgatcggcatggtgcactgtgttaatgaaggcactcttcaaaccactaaagctgaagtcaagattatcttccttgagcatcgcacgcgggaatttaaatgtatcttgacctaagtgggcaagccgatcgatttctttaccggctgggtattgaatcccgaggacgcgaccaattttatcgtaggcttcacctgctgcgtcatcccgtgtatcaccgataatttcgaattcgccggcggctggcatgtacaccaattcagtatggccacctgaaaccagtaaagctaacaatgggtattctaaaggcttaacaaaccgcgccgcataaatatgccccgccatatgattgactggaatcaatggtaagtggtgtgcgtaagcaatcgctttggcagctgtcacgccaattaataaggcgccgactaatccaggcccataagtgactgcgaccgccgttaaatcagcgtaagtaaccccggcctcttctaaagccgcttgtgtacaaactgtgatttgttcaacgtgatggcgactggccacttcgggtaccaccccaccaaaacgttgatgactcttaatttgggtagcaatgatgttgcttaaaataacatgaccgtcttcgatgacggccacactcgtttcatcacaactggattcaaatgctaaaattaattctcgtttttccgacatgactgactcctattgactcaatatccgacacatactgaatgcatcttctttttcctgaatgtaataattgggacgcgtccgcaccactgtaaaacccaatcgctgataaacggcttgagcgcttgtgttgctggcgcgtacttctagtgtaattttttgactgggataatcgtgggctaaactaaccatttcgtgcaccaaaaagtggccaataccacgtttttgataacttggccgcaccgcgatattcgtaatatgagcttcattggttgaaaaccatgcaccgacaaacgctacgacttcagtcccttggcataaaaccagatacaacgatgtcttgcgcttgctcaactcactagtgaaggtccaacgatcccacggcgtctgaccggcatagaccgaccgttcaatgtccaacaatgccgtaatatcattttgactcgcgcgtgctaagtaaaatgtcgtctcatcaatttcaacgcgccgagttgtgtaaggcatttctttcttgacccaaatctggggtttgaggtattccctaaacttgttccacatacgaatcagcgcctcgctcatcatgcgtttttgcccagttaacttctgcttccgtcttgcgtaaataaacgggtccgaagccatggatatccgcgacaggttcagccatcaagcctaattcacccaagacgctggcgtgcggtaaattatggttggcggacacgaaatgcgcgttactacctaatgcagcttgaatctgttcgttaaagtgtgcaacgtcattccccacaaaataaacaggttctgccaataattgtaattgtgccagtagtgcttctagtgaaacgtgttgatcggccacaacggtttgcaatgtcccattttgccactgataaatccccgcgaaaacattgtcgcggcgtgcatcaaacagcggtacaatcaaggcggtcgtatccatcacattggccgctagcaatgctaaactcgaaatcccgaccaatgacttattaagcgtccaagcaaaagacttagccgttgtcaccgcaatccgcaatcccgtgtatgaacccggaccttctgcaacgacaaagcgatcgatatcttcaatggtggtttttgtttgttttaatagttgatcaatcattggaagtaacgtctgactatgtgtttgacgaatattaacagtcatttcgcctaaaatttgatgatcttcaaggagtgccacactcaccgcttgattcgaggtatccattgccaatagcttcattatttcatccttcttctgcttataatccttgttattctagcataaaaagccggtttccacaaaaaaaggcgttatcttcaaatagataacacctactcatttataatactctatcttttaatctaataatcggttcgaaatgcatcacgatgtatagaataatcggatgaatcactaatgtggcagcttccccaatggcccgcgccgtaaagtggaacccaaatggtgtatgactaataatcgacacccaccatgaattcaaaccgaggttaacgatcagcacaactgtcacaacggcggcaatcacgcgccaccatgtaatcttttgtcggtagaagtaacacccatagatgaaagcccctagaaacgctgaaagtgtgaagcctgggaaataaccacctgggaccccaatcatcaaactattgatgaggtcgccaataacggcggcaagtcccgcccaaactgggccaaaccaccaccccattaaggcggtgacgatgaatccaaaactaattctgaaaatcgttagtgaaattgcaaagcgtgcaaccaccaattgtaaagcaattaaaacagctagtaaaacaacgcgtctagtgtctagcttaacaccaaaaatctgaccattaaccataaaaagcatctcccttttggagctgccacaaataatactgcggcgaatgcggtactgaaatcgcaagcattgctgcttttcgtctggtgtccacattccgttccaccagcacttaacgcttcagtcctactccgaatttttagaaccccttaaatgtatcactaacgttatttaattacaagcaattgattttcatttttcagcaactcttgcagaaaatttgctatacttacagatgagtaattcggatttaaagaaaggtgttcattaaacatgaagaaaattttagtcctccatactggtggcacaatcgcaatgtctgcggacgaagatggcgcggttgcacccacagatcaaaatccaatggccggctttgaaaagctgttcgataatcaattaatcattgaaagtgaagagttcgccaatctgccttcaccacacatcacacccgctgtgatgttaaaccttaagaatcgaattcaacaagctgaagaagacgggattgatggtgttgttgtcacacacgggacggataccctcgaagagaccgcctatttcttagacttgacacttcccaacaatatccccgtcgtcgtgactggtgcgatgcgctcgtcgaatgaaatcggcgcagacggattacacaacttgattagtgccgtttggacagccgcttctgacgatgctcatgataaaggtgtgctagtcgtgatgaacgatgagattcacacagcacggtatgtcacgaagacgcacacgacgaacgtcgcaacctttagaacgccaacttttggtcccatcggtttggtcagcaaacacaatgcgaatttcttccaagaattaattcgttctgaaatttgcgacatcaaaacccttgtcgaacctgtttatcttttaaaagcatacgctggcatggatgggactttattcgacgccatcaaccaacccaacaccaaagggctcgttatcgaagcactcggggctggtaacttaccaccagcaaccttacccgctgttcaagcgctattagatcgcaacatccccatcgtacttgtttctcgctgtttcaacgggattgccgaagacgtctacgattaccaaggcggcggtgtaaagcttaaacaaatgggcgtcaccttctgccaaggcctcaatggaccaaaagcacgcctcaaactacaagtcggcctcagcgcaggcaaaacaggcgcagcattaaaagaatttgtcagcaacgcaacatcatagagtgcgtcatcaacggttagcttctgagcacttgcctaacttagcgaattgacgctgtaagcgccgatttgataagtgtagcaaagcgcaggaagctgttgatgaaaacacgttttcgatagagtgcgtttgaaacggttagcttctgagcattaactggatttgccgaattggcgatgaaatcgccgatttggtaacttgggttaagcgcagggagctgtttcaaaaagcacgtttcaataaatattcgaagataacaaaagaaagccccatcacaactttatctgtgaatggggctttctttcgtttaaacgcgcttcctcgaactgccttttccggttaactgaataattgggattatggctaagacccgccataatcccaattatcccgttaatcctcaaagccaacccgttcgactcagcactctttccacgtaatctctgcttctgctgcacttaggtcatccacggcgactttatgccgtgttgtgattatatcatcaactatgagttgttcgaccatgctttgggtcatttgaccgtattgaatttcgtggccgtagcggatgttgatacttgctacgcggtgcgtcgtcaagaagtcataatcgagcgcatccaacatccattcaaaataatggacgttattaacgtgttgattaccatcaatatcgaaataacgcacacgatattctttggtcgtcacttgttcgggatcaatcttcttaatccgtgggaatcgtttgctacctttaatctcacttgactcgaatggtgccatgatttccggcacaacttgcaccatactccgtgtttcatacgacatcatcacgaagatgctttggacgaagacgcattcgttgccggcttcatcatataaccagaaattccggtaacagaaatacttgttgtaactctcagcttcagtcacaattttaactttttcatccaccttcggcatccgcgtaatcttcatttgatactgcgtgaccacccaaccaagattgagcgcatgcattgtcgcttcaccgacgttgagcgcattgagttgatgctctgatgctaaaattaaaatgttcaccaaggatgcaagcgttaattcgcccttgatatccgtttcgaaatacggaatttgatagttttctgaatattgctttcctggcatggcgtgacctctattctgttaattcgtggtaggcattataaacgacttgctttttcaagccatttgctttagcgaccgtcttaatcgccacgttggggctggctccttgttgaatctgggcttccacttgttcaggaagggatagcgattccgttgcaactgcactgaccgttgcatctggtgctggatttccagcaactatcatcacaaattcaccacgtaattctgtttcagtcgcccaagcaagcacttcttctaggtcgccacgaatgaattcttcgaacttcttcgtgagttcgcgccccaaggtgactttgcggtcggcgccaaacgtactgagcaaagcttgcaacgtctttttcaaacgatgcggtgcttcatagaagataagtgcttcaggcttttgtgccaacgtcgttacggcttccgttaactccttgcctttacgaggcaaaaaaccgtagaacgtaaacggttgtggtgtgatgcccgaagcaatcaacgctgtaatcccggcattggctccaggtaatggcaccactgaaatgcccgcttcaatacaagctttaacgagctcatgaccgggatcactaatcgatggcatccccgcatcactaacttgcgcaatatcgtcaccggcttctaatttttcaatcagcgtttcaatccgttgttgcgtattgtgttcgtggaaactaatttgtttcgtttcaatctcaaagtggttcaataacttctgcgtattccgtgtatcttcagcagcaatcagtgcgaccgatttcaatgtatcgattgcccggtaggtcatatcgcctaagttaccgatgggggttggtactaaaaataaagttcccatttccgtcgttttaaaacttgattgtgtttgcatgttctatcctttcaagatccatcaataatgacataaagacaggccaaaagtaagcatcccttttgccctgccttttttaatcatttgttcgttcgccgtagatgacatcattacaaaatgcgcaaggctcgttattttcgcgtcgtgacccataaaagtacgggcagatatggaagccttcttcgtaaagattctgtaagttttgttttgatttcgaaagggcttgagacccttccttacccgtttgcggggtggctgatggttccaattcttgcaaatgttcccgcaagtgcttgttttcaatctttaattcagcgtttttctcaaggacttcggcaaggactgctttcatttcactgagcccctcaaacgtcaatttagcttgctgttcaatgtctgataactgttcatataagtctttactcaccgttgatatcctcccgatacgctggttatgcgttttactatgcaattaactttaacgttaaactctctaagacgttttggcaactaatattttgttcaaaaatgcgttgtgcttgtaaagcatattccgtctgagcgaccaactgcgtggtagtcaacgcggcgctggcctgatttaactggctttcgtacgcaccaaaacaaggtgtgacgcctaattcatagcggtaattcaataaatcttgataccataagcccaccaaagttaaaaaggtcttctgctgttggcgatcaactaatactggtaaaatttgcgtctgaatctgcacaaatgcttctaaatcacgttgttcaactttttgtgcccacgcggcaagcttcgcactgacttgtaatagccaatcatccgccaataaggtctgtgcttcagctaagtcactcgtcaaatgcaccaataactgcgcttgttgtggcaaaataccagctgcttcaaactgttgttgcaccatttgtggtgccaatgctgccagatcaatcacttgaagccgtgataaaatcgtggggagcatttgatttttattactcgtacataaaatcgcgtaaacattttgcgccggttcttccaagaacttcaacaaactattagccgcgctggcggttaacgtttcagcagcttcaataatgaataagcgttgactggattccatcccgctcttagccacttcttgtttcaaatagcgaatatcggcaatcttaatactcttaccttccggcttaatttcaatgacatccggatgattatgcgtcaaaatccgctgacattccggacatgtccgacaaggttgcccatctggtgtcacttgttgacagaacagacgcagtgccaaccactgtgccaattgtgtcttccccaatccctgtgcaccagctaatagataaccatgcgccatctgtccacgcgcgataatctgggcaaactgggccacaagtttgggttgaagctgttcaattgttaaactggccatcgattagaagcggtggaactgttcaatcggcatcacaaagacggttgccccaccgacttgcacttcaatcggatatgacattgagctatccatcgtggcatccatattaacaggcggtgtcatgaattgttcgcgtgcctgacacgttttttcaataatcttaagcgcttcaggaacccgttcgtcttcaattccgacgataaacgttgtattcccagattttaagaagccaccagtcgttgacaacttggttgcccgaatgttggcatcgattaattcgctgcttaataagttgctatctttatcttgaacaattgctaaaagtaatttcatttcaatctccccttttctatgctgtgaataagtctggatatcgttgttcaatcacttgcagacatttggcaacaactgtgtctaagtctgcggtcgcatcaatcgtttgaatccgctctggattatcttgcgcaagttgtaagtaggattgccgaactttttggtgaaaagccaacttctcttggtccaatcgatcatattgatcctgtcgattctgtttaatccgttgtaaaccgacttcagatggtacatcaaggtataacgttaaatcgggcgctaatccattagtggcaaataagttcatttgcgcaacgacttcctcaccgatgccacgacctgccccttgataagcgattgaactatccacaaatcgatcacaaatcacgattttgttatcagccaacgctggttcaatcttttcaacaatgtgttgtcgccgagcggcagcgtataacagtgcttcggtgcggtcatccattgccgtattttcaacatctaaaatgacattgcgaatcttttcggcaatcggattgccacctggttcgcgcgtaacaatgatgtcttggttgcacttggattcaagtagcggtacaacagccatcaacgcacttgtcttaccagcaccatccggcccttcaaacgtaattaattttcctaccacaaaacaaccttcttcatccatagagttacttccattttacttgattcaacaaaagacgtaaagggaagagtgcgtatccggcggttatgttcttgcgtttagcgtgcgacagcagacgtttgaaataaaaaaagacaaagtcactcgaccttgtcttcacgctgcggctgtcatctgaatgcccgcgctatctaaatgtatttctagttgctgcttctttcgaaactgcttcacctgctactttacgttggcgggcttggcggaataagaattcaaactttgcttgttgaatcttactttccatctctaattggtcatcgagtccgcggacgttgtcttgcgtcttttgggccatctgccatttatctttgacttggtacactaaatccaataaggcttgatcacctaattgttttaatgtcggtttttttctaccaaacatcgcaaacccaccattcttaaatttcttgacgcccttcaaccgcttttaacaacgtcatttcatctgcgtattcaatatcgctaccgactgataaaccgtgcgccaaacgcgtcactttaatcccagctggtttaatcaaccgcgaaatatacattgccgttgcttccccttcaggtgttgcattagtagcaatgataacttctttagccggtgttttttgcaatcgtttaatcaaattggcgatgttaatatcatcgggccccttgccttcaatcggtgataacaccccatgcaagacatggtagagcccatgataatcattcatccgttccatcgacatgacatctttcggttgttcaaccactaagatcatgtcttgactccgcgttgtatcgcgacaaatttcgcacgggtcttcatccgtaatgttgccacagacactacaataatgcagatcacgacgtgccgaaattaagttcttggcgaaattcgtcacatcgtcttcattcatatcaatcgtgtaaaaagctaatcgggttgcggtcttgttcccaatcccaggtaacttcatgtagctttcgatcagcttcgcaattggttctggatattgcatcaatgcacttccttaatgtctcacttaaaatgggaggcctttagtaaatttacccatttgggcttgtgtttgtttatcgatttcagtcatcgcttcgttagttgccatgataatgaggtcttgtaacatatcaacatcatctggatcgatggcctctggtttaatggcaatgtctttcatcttcttgtcgccagtcattgtgaccacgactaaatcgttggctgctttgccgacaaattctgtattgttgagggcttcttgtgtttgccccatttctttttgcatcttttgcatttgtttcatcataccttgcatattacccattccgcgcatcttcattacttcctttcaaatttaaacgttaatcttttttaacaaccaccgcatcgccaaacaaagcttgtgcttgttcgacaacggccggtttttgttctggtttcggcgttgcttctgcttcgtcatcagttgttacctgttgacttggtactgcgtgattctgtaaatattcctggcgaatttctggccaaacatcgtggggcactaaaactaccttgaaggggttgccagtcaaacgattcaatccgttttctaaaatgttcaaaaggtcttgatcattgctagctcgctcgaataaaatcgcgtagttaaacgcgacgacaacgccactttgactcgctgcaaccggttcggaaaccttcatcacggcgcgcttggtaacgtccaacatattcaacagatccggccagacttctttgagattctccaaattggtccgcgtcgcatctgccaataccggataaatcgccttacggttgacctttttactaatcttcttagcaggtttggcctttggcttggcagctggagcactcactggtcccgccgcttccaatttttgtaacgccgcttgtaattgtgcaacttgttgactcaacgctgcgacttgttcattatcagcagctggtgcggcacccatcgtagtcgttacttgggctgtctggacttgcgtcaagcggaccgttgcgacttccagatagatttctggatggttcgtgaaacgcaattgctgttgcgtttcattcaggatatcaatcaccccgtacaaacggtcagccggcatcgctgcactgagcgctttgaagtgttcatccaatagatccatttcacttgcggcgactaattcgggtgcttgttgatacaacagtaagtcgcgcacatattcaattaagtcttccacaaaacgttgggcatctttaccttcagccaaaatctgttgcaacaattgcaacgcttgtttaggcgcattatcctgaattgtttggacataatccgccaacaacgcttcggttaagctgcctgtcacatccaacgcattatccaacgtgacgtgattgtcgctaaaggataacacttgatcgagaatacttaaagcatcccgcatcccaccttcagcagctttggcaatcactttcagagctgctggatcataggtcatttccttttgatctaaaatataagccattcgcttaaataaatcagcggccgtgatccgcttaaaattaaagcgttgcgtccgcgaaatgatggttgctggcaccttgtgaacttccgttgttgcgaggatgaataccacatttgttggtggttcttccaacgtcttcaacagtgcattgaacgcaccagtggataacatgtggatttcatcaatgatgtaaattttataatcagcttgggtcggcgcatatttggccttatcccgaatatcacgaatctcttcgaccccattattagacgccgcatcaatttcaatcacatcattgagggcgccagccgtaatggcccgacatgtctcacattcattacatggttcgccatctttttgataatgacagttaattgccttggcaaaaatcttggcagccgatgttttccctgttccacgtgggcctgtaaataaataagcatgacttgtttggtgcgtcataatggcatttttcaatgtttgggtcattgtttcttgcccaatcacgtcatcgaaacgctgcgggcgccaaacccggtataaagcttgatagctcatttaatgacctccacctttgcaatttaaagtccgattcatttaaaactacttgttccattttagcatattttaccgtcaattttgattgcgttgcatgaaaaaagacccaaccgacaaaattaattgtccgttgggtctggttaattttcacaaaacttaagacacatgataaaacaaacttagtgctgctttcttccgaacctgacacgattcgtaggctcatcattgtctcaaggcctttcggcaattcctattctacctgattcaagcattaattaccagccattttctttttttttacggcgattttcgcgaatctttctaaaaaaagtctgcaataaactcgcacattcagcttctcgcaccccgccaaccacttcagcttggtgattgaaccgtttgtcagttaataaattcatcaacgtgccggtcacaccagccttaggatcactcgcgccaaaataaactttgggaatccggctattgataatcgcgcctgcacacattgggcatggttctaacgtgacataaatcgcggtatcttccagacgccaactcttttcaaccatacaggcttcttgaatcgcgagaatttcagcatgtaacgtcgcatcttgcgcgtgttcgcgaatgttatgcccccgtccaataatttgtccgtctttaacaatcacggcgccaatcggtacctcgccaatgatgcgtgcttggttagcttcatcgatggcggcttgcatccattgatcgatctcttgttgtgtttcactcacgcgttagtcgcccctttattttacttctcaactattaaaacacagtcgcgctagtcgagcaattaaaaatggtgccgacggattgtcgataccatttttaattgctccataagccatcctcttccgtttaactgcaaaatgagcattatggcaaggactgccataatgctcatttcactgttaatgctcaaagcctgaccaactcgagtcgcactctatagtttttctttcacctttgttgcgtaagccattagtgtttggcgcaaatcatccatcatatctggtagattgtctgcgtgttcgccaagcttatcttttaattgggttaacctgtctgccgcagtcaacaagttattcacatccgcatcggagagttgatcgaccaactctaacgccttttggttaccatgtaatttgtcttttacaaaacttttaactgctaatcgtttgcgatagcgcgatactttatcgattactgccttagaaccgacaaaagcggtcgttgcgccaactgctgcagtcacccctacgccgattaaaattttatatctggttttcatcgtatcaacctccttgtactttaatcatagtttagcacaattcgcctgaatttaccgctttcaaccccggtccttactttaatttaatactttggagaatgtaataccccttatccttatgaataatttgcacgttgccaaaaatgctcatcatcgttttcttcgctgatggggcaccttgtttcttttggatcacaacgttcaattcaccatctggtaataagtgatcataggcaccagtcaaaatattttgcaccacatcttttcccgctctgattggtgggttggtgaagatggcggcgtattgatccgttacgttttgatattcagctgattcgaatacagtaacgttggtaatctgattcaattcactgttcttacgtgccaaatccaatgcccgttcattcacatcgaccatgtcgattcggcgctctggtgcgagcttagcaatcgtcatcccgattggcccgtatccacaccccatatcaagcactggaccagctggcgcttcactcagatcgaccgctgctagcaatgcccgtgaaccgtaatcaacagtgcttttagagaataccccgttatccgttgtaaatttaaaattaaagccgcgtaattcaaacgtccattgccgctcagcgtgttcaacgtctggatttttagaatagtaatactctgtcatcttttttcctcatttgtcgttagttatctgaaaatttcccaatttgaactgacttcatcaaacgacctagcaagccaccaggatgcggttgatccgcaacccgttgattaacgaccattaaaacttgaaccatcgtgaaaattaatgaggtccgtttttgataagcgatatatttcgaacgccattccgtcgtatatttcttcttataggtccgtaatccctggaatccgtagaagtgatagccgtattcatagatcagatgagcgattcgttcttcaataaagctaaactcggaagtccctacatttgcaagaggcgccatgccgaggttgaagtacgtgtagccatccgttcgattttgttcaaagagattaataaagatctcatccattataccagatggcgcgtcttgtctgtgacgcattagatcaatacttgcgacttctttggttcctgttggcatttcgttagcgaaagcaattaattggtgatcggcattatagacaactgcaattggggctttttggaggtatgcttcatcgaaaaagcctaacgagaagcctttttcaacgcgactacccaaccaatcatcagaaaccgctttgagttctgccattaattcggcactaaatggtgggtttaaaatttcaaattgatagccttcacgttcaaacttattcattaaggcgcgttcagcccgccgtttcttaccagtcatcgtgaagtccgccaaacggacgtagccttcttcaccaaacttgataaagtcaaacccgatttcatgcagttgcatcgttaattcacttgaaatttcgtagaacgctaaatgacaatcaatcaaatcagcgtcgtgcatcatctgttcaattgccggtaaaattttagccggatttccgactggttcacccattacaattaagcgatccgcttttttacgataaagcaagaatacctgatcttctccttcttcctgatagaaataaactgatttatcccgtaagtatgccaaatgactgacctcattgccgccgtaagtgttaatcacgttagcaattcgtgcttcatcatatggcgctgctattgaacggccccctcgactgagataacggtagacgagatataaggtccctgcggcaaccaacatcccgataaaaccagccaaccagactctttcggatggaaataaaagcgctgttggtacgggtttgcgatgccgtaagtgtggcgaattggcaatcccaacaaagccgtataacaagaaggcgcccacgaaaagtacaccatccacaatccgatcattccatgaaaattcgatccgttcacggtataattcgcgtttcaataagaaactagctacgagcacaaaagttaaaaagacagcgagtttgattgagaaatcccgccatagtgtattggcaatcgcaatcaccaatagcaccatcaacggccagaaaactttttgaacgcggttggcaacgccgcgggctaaggccaacatgacaaacgctacaatgatgtttgtcacacgatctaagaagaagaacgtgtatgggtagagctgtccaatcactgtgttggtaatcgcaaagttcgggacagttgctactaataatagaatgatgcttgaaatataaaggaagaaaacaatgaagtgatgagcgattttttgcatcacctgccgaggtaagccctgtaaataatgatttaaccggctgcctgcatcgtgagtaaataaaccaacgccgactaaaaacggcacgatgtaataaaagactcggtaaaatgacaaccagacaacggcgtccgcattttgaacgccgactgcactcagaccaaagatcatgaacaaatcaaacgttcctaagccccctggtaccatcgaaataacaccaatgatgttggcaatcatgaaaagtggtaagacttgtaataagtcacccttaatctctaagaaataaccaatcgttaagaaaaagccgcccgcaaaaccccattctaagaaagaccctaatgttaggcgtaaaacgcgttgcatcgaaagatctttgaaaaaggccgcatttttaaagcgcgtactaatcatcagaccagggaaatacaacgaaccgcccactagccataaccagtagttggcatacatcccaccaataccaaagccaaagatcaaaacgacactaatcagacaccagattgacaggccggctaataagaacagcgcaatttttgaaatcgcaattaagatttctttttgtgacgcttttttaccatagaaattggcccgtaaactcgcacctaagaagcccccgaatccggcaatgttcgtaaacgtattgacgatccaaccagatttgactttataccagaatgaatagtcctccggcagcaactccgcaatcacgaaatcataattgagcattggcaagaccgccacaaacccaatcaccagcatcgctagcaaggtccacggactttgtgtcgttaaactcgctttcaattgttccccgttcaagtcccggaaaatccggccgacttctaggataacaaagaccatcaccgaaaggatgaagatgccttttaacaacgttaggtgtcgctgaattccttcatatatgtgtttgccccattttcgcatatcaaccgctccttaacttaattaatttaattataagctatcccaaggcaaaacacagtaaaatgacaattatgttagatggctgttagattatgattttcgcttattacttacccggagcacaatccgattcccgttcacccgacaatcaatatcctctgattgcctttttagttctcaacagcaatggctgtcgcttaagatatggaatccatatttagcatcgtgttattttgtgcaactcgccatttatgttttacaaaaaaatatgtaaaaaaagaaccccacattagtggggttcttttagaaataaaacgtgctttcattaactgctttctgcgctttgctacatcagtcaaatcaccggctgattaggcaaatgctcaaaaacaacccgttaatgacgcactttattttgaaacgtgccattggcgctagatttctgcgcttaactacaaatcgggcatcatggcttagatcgccacgatgcccgattttaggttagtgctcaaaatctaaacaagcgccaagggcgctctatttaaattatttcaagttaacgacagcgccaacttcttctaatttagctttcatttcttctgcttcgtctttagcaacgtcttctttaagagctgaaggagcgttatcaactaagcccttagcatctttcaagcctaagcctgtgatttcacgaacggctttgataactttaaccttttcttggccgatttctgataattcaacagtaaagctgtctttttcagctgctgcgtctgcgccagctgcacctgctgctgctactggagctgctgcagaaacaccgaattcttcttcgattgctttaactaagtcgtttaattctaagattgatgattcttttaattgatcaacaattgcatttacgtctaatgccatttttgtttcctccattttgtgggtaatattttttgataacacttttaactacacaattttaaattatgcagctggttcgtctttgctgtcggcaactgctttaacagcatatgcgacattgcggactggtgcttgtaatacagaaagtaacattgataataaaccgtcgcgacttggcaatgtagccaaggcattgatttcatcaagtgttgccactttaccttcaatcataccacctttgatttcaagtgcatcagcactcttagcaaagttagcgatgatcttagctggtgcaacaacatcttcgttagaaaatgcaactgctgtagggcctgtgaatgtatcatccaaaccttcgtaaccagctttgtctgctgcacgacgcaagtaagtgtttttaacaacttccatttgtacgccagcttcacgtaattgtttacgtaattcagttacttgttctactgttaagccacggtaatccataacgacgatagaaacagcactattgaatttttcaacaactgtgtcaacaatttgtgctttttttgcaatgattgtttcgctcaattgattcacctccattagatttgtaaaacttgtggtcaagagttccttataaaaataaaaaactccatgtccaccaagacatagagagggatttcaacgtatcttcctcggcaggatattaagcctattggcacctgagtcttcggtagcataaataaccaactacaaatatagcatggattccataaagcgtcaatcattatcggcacttaattttagttatcctagcattacgttttacttattttatttttctgaaaaaacggtttaaaattgagactatcaagaaaattaatcgtaagaggtgcagttttttgaataatattttagtcgttaacgcgggtagttcatcattgaaatggcaactattccaacaatctgatttaaccttactggcaagcgggctcatggaacgcatgaacacaccagaagctagcttcaccttcaagttccaaggtcaaaaagaacaagtcgccattgctaatctttcctatgaagatggtgttcttcgacttttgaaacaacttgaagacaatggcatcattcattcacccgcagacatcattgcagtcggccaccgggtcgttgccggtgctaccacgttcgaaaaaccaaccattattgatcgcaccaacttagatacattaaaacaactcgacaagtatgcacctttacacaatcccgtgcaagttgactgcattgaaaccttgatgcatattttaccaactaatgtccctcaagtggctgtctttgatagtcaattctatctcgatatgccagatgaaactagtttttatggcttaccttatgaatacagccaagactatcaaatccgcaagtatggcgaacacggcattagtcacagctatatcttacaagcaacagctgactttttgaaagaacccgttgccgatttaaaattaattacacttcatctgggtggcggttcttcaattacggccagccaaaatggtaagcctgtcgatacatcaatgggcttcacaccgttagaaggcattccaatgggcactcgcgctggttcattagatgcggccatcgtcccattcttaatgaacgaattggataagagtgccgatgacgtcatcacgcttttgaacgccaaatcagggattctcggcgtttcaggcgtttccgctgacatgcgcgatattcaatcaacacgcgctaccaatccacgggctaaactcgcctacgacatgtttatcacttctgctgtgaagttcatcgcgagctaccacgttgaactcggtggtgcgaacgtcatcactttcacagccggcatcggtgaaaacgacgcccgtttacgtgctgatatctgtgccaagctggctgttttaggtgttcaaatcaatcctgaattgaacgaaaacggctcaggtgcccgtcaaatcagtacccccgattcagccatcaaagtcttgatgatcccaaccaacgaagaattggcgattgctaatcacgtcctaacaaccatctaaattaatcgcgaattatgagagagtcattagcgtttttcacgctaatggctcttttttgataaaataaacccttttcatcaccaaataacgaacaatatttacaaaataataaacatttttcatattcttcttaaaaacacgattgttttgttgtacaataatgccaaggttcttaaaatactaattcagaagtgcataatggataagaatattgatattgcaacagaaacacgaacgaactggttcgaacgtcaattcaaaattaaggcaagtgggtcgaccattaaaaccgaaatcatcgccggaattaccacttttattgcgatgtcatacattttattcgtcaacccaactatattaggcgacgccggcctagataagggggccgtctttgtcgccaccgcattaactggagtggtcggctgtttagccatggccttcatcgccaactacccaatcgccgttgcacccggactcggcagcaatgctttcttcgcctattccgtcgttttaggcatgggaattccttggcaaacagcacttgccggtgttttcgtcgcttccctccttttcatgcttgtcacggtcttaaaagtccgcgaagtcgtgattaacgcgattcccgctaatttaaaagccgccatggccgttgggattgggttattcatcgcctttaccgggttaaaacaagggggcatcgtcgtcggtagtgctaaatcattcgtcaccattacgagttggtcagatccgcacgtttggttgaccgtcttcggtttaatcgtcaccattgttttattagcccgcaaagtccctagcgctttattcatcggtttggcggccacagccatcatgggagtcgtgactggtctaatcgcaatgcctcacagcatcatcgcttcaattccaagcttagcacccactttcggtgtctcaattatgaacatccacaacgtcttcaatgttcaaatggccgtcgtaattctcgtctttttcttcagcgtcttcttcgatacaactggaacggtaatcggacttgctcaacaagctggtttcatcaaggacaacaagatgcctaaggaagtcggcaaagcccttttcgccgattcaacctcaatgattgccggttccgttttcggttcaaccccaactgcttgttacatcgaatcatcaactgggattgctgctggtggtcggactggtttcaccgccgtggtcgtcgccatcatgttcgtcttaagcttattcttctcacctttactggccgttgtgacgtcgcaagtgactgccccaatcttaatcatcgtgggttcattcatgatgaagtcaattgtcaacatcgactggtcagaattcgaaacttcttttgcagccttcatgattattctgtgcgtcccattaacctataatatctcatacggtttagcattcgggctgatcacttaccccatcaccatgattgctgctggcaaaggtaaaaaagtgcatccgattatgtatatcgctgcgctcttattcctattattactcttcacaatgcacgaattacctgctaaataaaggagattactcatggataaaacaactttaaaacaactaattgatcaagctgctggccgtcaagctgccgacatggtcattaaaaatgcaaaaatcgtcgatgtctacaatggtcgtattatcgaaggcacactcgcgattggtaatggtcgcttcctcggtatcagcgacgactaccttgcaccaaaagttatcgatgcacgcggccaatatgttgtgccaggtttgattgatccgcatattcatatcgaatctgccaatgtctcacccgctgtcttcggatcacttgtaacaccacatggcacaacgacgatcttggccgacccacacgaaatcgtgaacgtcgctggcatgcgggggcttgaatacatggtcgcatctgccaaaaagacagcacttgatatcaagtacaccatgccctcgtgtgtgcctgctgctaatccaagcctcgaaacatctggtgctgtgattaccgctgctgaaatccaagattcttacgaccgcaatctcacttacggccttgccgaattcatgaattatcccggtgttgtcaatgctgatgatggcgttttagacgaattactcgtttcactcaacgcaaataaactcatcgacggtcactcacccgctttaaaagaacaaggcttaaacgcatatgccgctgctggtattcgtaacgatcacgaatgtacccaagtcgatgaaatgctcgatcgcatcagtcgcggtatgtatgtttatctccgctacggcaccgtctctaagaatatgccaacccttttgaaaggcgtgacgccgcaaaacgcacgtttctgttgtctctgcggtgacgacttacaatccgtaaccctccgtgaaaccggccacttggatgaaagtatccgcgttgctatcgcaaacgggatcgaccccatcatggcaatccaaatggccaccatcaacactgcccaatgcaccggcttagctgaccgcggcgggattgcacctggtttgaaggccgatttcctattggttgatgatctcgaacaattcagtgtgaatcaaaccttcatcgatggtcaaaaagttgctgctagcggcgaatacttactaacaactgaagattcagttactggttttgatgacttgttacaaaccgtacacctcgatacattcaccgctgaccaattaaaactcaacctcacaagcgataaagcccacgtgatcggcttacaaagcatcagtcggacacaaaatctcgtcttaccggtcgctcacactgcagacggtgatttccaatatcatcctgacgaagacatcgctaaagtggccgtagttgaacgacatcatctcactggtaatgtcggggttggcctgcttaacggctttggcatcaagaacggtgcgattgccaccagcatcggccacgatagccacaacctcgtagtagtcggtaccaacgatgctgacatggtcgttgccatcgaagcgctcaaagaaagccaaggcggtggcgttgccattcgggatggccaagtcatcgcaacattaccatttgtcatcggcggcttaatgagtaacgaacccatcgacactttaattgaacatcaaaaggccttcaatgctatttgccacgataaactccacgtcaccgctcacttcgatccgattatgaagctcggcgcaatgccactcgacgtcatcccgaacttgcggattacagataaaggtttagtggatgtcacaaaattcgaaattatcgacattaatgcttaattatagcaacaaaaaaagcgctcatcctttcggatgagcgctttttgcattaccaacttagaagctagcaacgtcaactttgacaccagggccaaatgttgagctaactgataaacttgtaatgtattgacctttagctgaagcaggacgagctttgatgatcacgtcttgcatcgctttaaagttttctactaatttagcagcatcgaatgataccttaccgattggtgcgtgaacgataccagctttatcaacacggtatgccacttgaccagctttaatgtcgttaactgctttagtaacgtccattgtaactgtaccagtcttagggttaggcattaagcctttaggtcccaagacacggcctaaacgacctacttgagccatcattggtggtgtagcaacggcaacgtcaaagtctaaccagccgccttggatcttttcaactaaatcttctgcgccgactacgtcagcaccagcagcttcagcttgttttgcttgttcgccttgagcgaaaacaatcacgcgttgtgtcttacctgtaccatttggtagtacgacagcaccacgaatttgttgatcagcttgtttaggatcaacgtttaaacgatatgcaacttcaagagatgcatcgaattttgcaaaatcaactttctttactaagtcgattgcttcttcaacagtgtatgctttagtagcatccacttgctttgcagcttctaaataatttttaccttttttagccattagggttttcctccttgcaattgtggtgaacggtttttgacctcccacttgatttttcaactttcattgaaaatccgactgaaagtgtcaagcatgaattaaccttcgacagtgaatcccatgcttcttgcagtaccttcaaccatgcgcatagcagcttcaacgtctgcagcgtttaggtcttgcattttagtttcagcgatttcttgcacttgagctttagttacagttgcaaccttcttagtgtttggttcgccagaacctttttgaacaccggcagctttcttcaagagaactgctgctggtggtgtctttgttacaaagtcgaatgaacgatcttcataaacagtgatcacaactggaattaataaaccagcttggtcagctgtacgagcgttaaagtcctttgtaaagcccataatgttgataccagcttgacctaaagctggacctactggtggtgctggagttgctttacctgcaggaatttgaagtttaacgatgtttgctacttttttagccacgaaacatacctccttaagtccgtgatgtggttaagatggccattatatttggtctcccactagtgtatgaaaacataccttaataatataccaagcaattgccgaaaaagcaaggcgattccattaatcgcgccacaagaaatcatcaatggcttgatcaactaaacgattttcgtgcaacatgctatgtgctccacccggtccacgaactaacatctcctggtaatggcgcacgtgtccttttaataggctacgcaatgcaaaactactatcgactgctaccgaaccatcgtgtcgattagttcctagtaactcgccagcaatgtttaagacactgatcgcagttggaaaatacttggcccgcacggctaaataattataattacgtgttcgtttaactggtccacgactggttaactcgctccaaaaaacaagtggtgtatccggaccaattgatggatcattaactggcgctgccaacaatatcactttgtccaccacggcatggtctgatgtcaacaaataacgcaacaccgtaattgcgcccatcgaatgccctactaaattaacttgcgtaacgccatacgcttcttttaagtgttcaataatcgcagctaaccaacggacttgatcttgcacatcggcgcggttattagcaaataagacttgaatcgttgggttattagcctgcaacgccgcgtctccatccacatgcaatcgaccgtttctgcccacccaaatgaccatgctcttcttagcaattccggctttttgtaggcgtccgagtaagtgaccgaatgaatagcgattcccccgatagccatgaatgaatagcgttggttgttttgtatataaacgtgcgcacggccgccaatgtgccgaaacccggattagtttgtaaaaatccagtcctgccagtaagactaacaaaaaaatgactaagcccactgcagttaatatttgatcaatgatataccacatcgtcatcacatcattctttcgaaatagacactattgattgttcaaaaaaagcggctgagacaaatcatctttcgtctcagccgcctatcttgttggggcttgggacaaatcctagccccctactttaattgttgaaacgtgctttttgaaactgactcttgcgcttaactacatttgtcaaatcggcgcttgtagcaccaattcgccaaattaggttaatgctcagagtcaatccgtttcaaacgcactcttttttcgaaacgtgctccttcagtcatcccgactgaagtcgcactctaaactagttcgtctacttggtcgtagtctaattctgttgctgtttcacgaccgaacatgtcgatattaacctttaatttcatcttttcgtcgtcaacttctgtaatttgaccgacaaggccagcaaaggccccttcgataatcttcacagattcgccgactttgaactcaacatccaaatgacgagtgctcatgccaagttgacgcaagatttgtgtgatttcatcatctaataatggggctggtttgctacctgcaccgtgtgaaccaacgaagcccgtcacacctggtgtattccgcacaacgaaccaagcttcgtctgacatcaccatttcaaccaaaacatagcctgggaaagtcttcttcatgtcgactttgtccttaccgtttttgatttcatgttcttcttcttcaggcaccacaacgcggaaaacattgttctccatccccattgattgggcacgcgattccaagtttgccttcactttattttcgtaacctgaatatgtgtgtaagacataccagcttttttcgattgattcaaccatgtgcgttctccttttaaataccaaaataaaaaaactccgaccacgcgaagttttttgcttgccattagtatagcaaatccggcttaattaagccagttctaaaagataaataattgtagtacttttaagattgcaaaatcaacaacgccaaagaaaatggcgaataaaacggaggtcatgacgactgttgatgtatctttacgtgtttgtttggcatctggccaactaacagttttcatttcctgaccaacactcttaaaaaacttaatcatcttatttcctcctaattagcgcgtttctttgtgttgtgagtattgcccacaatgtttacagaatttgtttaactctagacgttctgtccgattcttgttctcagcaacatagtagttacgtgagccacagacagtacaggctaaggcgactttcttaacacccatatgaaaagcccctctctaattgacgtttatcccatttactttatcatgtgttgaccaaactgtcaatgtggtggattatccccaccaggtcgtgcggacaatcgctaataacaagctgacaatcaagctaatattgatcgccatcgcattttgaatcgcggtaataaaggtgacatccttcagttgccgcgtattaaaccggcgattattgcgtaaaatgacaggaatcaataataacaatagtaacgattcaatcggtaagaccttcgtaatcactgccacaacaacggccactagtgagaaccaaatcaacgtattatacaaccgcaacgcccaggttgttcctaaataatgcggcagtgtataacgttcattgcgccgatcttgatctagatcacagatattatccgccaacataatgttcgaagtggggattgcaataatcacaccgattaggcataaactaagcaatgttggtaattgacctttaagggtaaacgtcggccaatcaaaatggagcgccatgatgctgtcgcttggtacgttgacatagaccatgataaaaaatgcaccaaatgattctgtcacaccactcaacaattcaccaaccggcatccgcgacagcggaactggcccgaacgtgtaaaagacggccacaaaaatacaggcgccaccgattaatagtaataaaatattcgtttgccaaaccaaccaaattccagccgccatgctgaacaataaaaaatagagcattaaatgcagtgccttggttggcgacaaatgtttgcgcccaatgatattcgtctgtgcccgataatccagatcaactgctttgtagtaatccatcacattattaaagccagtcacaaataatgcaatcgaaaactgggcgacaaaataaacaactgtcgtcactggattcagctggccattaacgtaccaacaataaacaatccctaagattaaaggcaagacactcgctgtcttggcctcaatccggacaaattctaaaaacgttttaaaagacatctcggacttccttccattaaaaaagctaggacaaattgacttgtcctagcttcatcgtaccttctagcagacagttacccattaattcattggcagctgactgccgaagtcccgttttattcaccgtaaacgatgttatcaactgtaatcgttgctgtatttcctttttgtgcagcattgactaattgttcagcatagttgacgaagctgtgtgatgattctgttgcaccagaaacaacatctactttgcctggttcttgtgctttgacgaattcagaattcaacttagcgatgtattccttaggatcagtcttagcaatcttcttcatttgtttgttgtatgcagcatcgtcagcttttgacttgccatctttattgatgttatcgaatttagattcagtgattttaccgtctttaaccaccattgtgaaaactgttcgatagtcatggctgtaattcttttcttctaacttatatgtgccatcttgcatcttagcaccattgtcgatttcgattgtttcagtgttgccagcttgagcagcttgcactaattgttgtgcgtaattcttaaatgaatttgagctatgagttgcgcctgatacgacttcgatgcttgaaacatctgcacctttatctgtaaattctttgttcaacttaggaatatattctttaggatttgtttttgaaactttcttcattttttcgttgtatgtcttgtcatcttgttttgacttgccatctttatcaacgtaatcgtaagttgtctttgtcactttgccgccggcaacggtcattgacatcttaacgcgataattattttcgtagttcttttcttctaagttgtaagtgccgtcttttaattcaccgccggcaacttgtttcttagcggttgcttttttgcttgatgattctttgactgaactagattttgcctcttttgaagatgaatctttagcgttattactattaccacaagctgctaataccattgctgacattgcaacaactgataaactagctaatgctttacttaatttcataattttcccgcccttttcataaataatcatatagtttgtatcaaccttcacacaaagtcagtttatcttttttatgtaaaaagttcaagtcttttaaatcacttattttacggcgattaactttggttttacacaatttaaaacggtttccttaatagtcatcaatcccattaatcttatccgtgaataaatagacaatctttagtttattctgtataatggatactgattgaaaacgcatttatttcatttaggggtggctcatcatggctcaaaaaaacatcgtcatcatcggtgccggttttgccgggatctatgcgactaaaaaacttgcgaaatattacaagaagaatccagattatcaaattacattaatcgacaaacattcctactttacgtatttaacggaattacacgaagtagctgctaaccgcgtgccagaagaccacgttcaacacgatttgcaacatctcttctgtcgccgcaaaaacgttaagttggtgaccgatacggtaacccgcatcgatcaagcaaacaaaaccgtcattactgaacatggacgctacgcctatgatcaagttatgttggggattgggagtgaacctaacgactttggcacacctggggttgccgaacatggtttcactttaggttcatgggaacaggctgttgaattgaagcaacatattatcgatgttgttcgtcgtggggcaattgaacacgacccagaaaaacgccgggcccttttgaatatcgtggttgttggttctggctttaccggaactgaaactatcggcgaattacgcgactggcgtgatgaactagcagctgataacaagattgatcccgaagaaatccaatttacaatgatggaaatggcaccaaccatcatgaacatgctcgaccgcaacgatgcagccaaagcagaacgctacatggctaaacaaaaaattgatgttcgcaagaataccggtgttacaggtgttcacgaaatgcatgttgatttaaatgatggttcaactttcccaactgccactctaatctggacagctggtgtcaaagcttcctcacaagcggcacaatttggcctaacaaccggtaaagccggccgaatcgtgacaaacgaattcatgcaatctgttgacgatgacaagatttacgttgtcggcgatgtggctttcttcgatgaaactgatgacggccgcggtcaaccccaaattgttcaaggcgccgaagcatctgctgcaacagccctaaagaacatcatcgcaactgaagaaggtaaagcaaaagtcccatacaaagggagctattccggcttcatggtttcaattggttctcgctatgcggttgccaacttgatgaatttcttccatctcagtgggttctttgccacattagttaaacatttagtcaacatgctctattttgttcagatttattctggctacgatttattccactattcaatgaatgagttcttcagaacgaagaacgatcgcaacttgatgcgcggtcatatttcacggtatggtaatgttttatggacagttcctgcgcgaattttcttaggcgcaatgtggcttgttgattgttgggacaaggttcaaggtgaaggttcttggttcaccaataagctccggttaccttttgactggcttcaaccagctgtcaccagcggtgcttctaaagcggcggatgcaacaagtgctgctagcggtgccgctgcaggcggggctgctgaaccagcaactgctaaagtcacattcggcctttcttacttattcggtcatgatccaatgcccgtcttcgataagatgccccactggttctacagcatcacgaaggtcttgattccaaaccaagaagtcgccttcttcatgcaaaaaacaatgaccatcattgaaattttaattggcttagctttaattgctggtctcttcacttggttaacgagcgcagtaaccgttgcaatggttatcacattctgcctttcagggatgttctattgggttaacatttggattattccaatggccctcgcctgcatgaacggttcaggccgtgccttcggattagataaatgggttgttccatatttacaaaaacatctcggtcactggcgctacggccaacaacgtgcactatacaaaaatcaatgagtgcgtttgaaacggtttgactttaagcattagcacagggaagcgaattagcgacatagtcgatgatttgattcacagcgctaaacgcagaaagttaacttcaaagcacgttataaaactgagtgcgtcaaaagcgtttattctatgcggattagcaaaattagacgaataactagcgtagctagttgtttggctaatagtgctaaacgcaatagaatgcttttgaaagcacattataaaagcaattcacagctatcaaaaggagggggttatgacagacaggcttttgtcataaccccttttattgctattttagagagaaagactgacgcctatgtttaaacaaattcgcgctaaccgttacatcaaaatgattcgccctggtgatataatagtagtcatcggcctgtttattctatcgtttgccccagttgctgtttttagttggcacgaatggcaaacgacgcaagcagcggattcaaacgcgcaggtattgacggcctacgtcaaacacgatggcaaaaccgtctacaaagtgaacctaaccacccaccatggtgttagccacttcacttatcgcgatgccggcggtgattacaacaaaattaaggtaaccgatcatgccattgaggtcactgaagccaattgcttcaatcagattgatgttaagcgtggcaaaatttctaagccaggccaaaccattgtttgcttaccacacaagttactgattgaaattaaagccaaggatgggaccgacacgggcgggatggtttctgcctgatttaaaaggagtacagcgatgactaacgatcaaacgcgtaaatacatctatattgcactcttgtgcgctcaagggattattattggccttgtcgaacgcgcgattccatttccatttgccgtagccccgggtgctaagttgggactagccaatttaattaccatcatttcgttatttaccctaccggtcagcgactgctttttattgatggtgatgcgaactgttttatccgccttgctagggggaaccctctctacttttatgtatagcattgctggggcaacgctaagtttctttggcatggtactcctcaagcaatttagccgccgctttatgagtatgattggcatctcagctgctggtggtctgctctttaatgtcggtcaactctgcgtcgcgagtttcattgcccagagttggcaagtcctcctctatctaccagtgcttgcttttctcggtattctcgccggaattgcggtcggcgtagccgcgaattttttattcgaacatgtcaaaaccctgacttttttaaaagcccaacacgaaatttaatttaacaaggagttaattatggcgaaagtacatgccatgtggcagaactatccagaaatcgaaaccgaacttgcgcaaagtcttgcgctcattgaagacaacattcacaccaaaaatcaagccgtcaccgacgccattttaaagatgattagtgctggcggcaagttgctccgccctgcttactgcttattattttcacagtttaatgcagtcgatcgacagaagatgatcgcattagccgccgctgttgaaacgctacacactgcgacattaattcatgacgacatcgttgataattccaatttacgtcgccatcaagaatcgattcaagcccgtttcggcaaagatgtcgccgtttacgctggcgactacttattcgttgtctgcttcaagttactagccaattatgcgagcgatttgaagagcatccaatttaacagccaaacgatggatcaaattcttgacggtgaactcagtcagatgacaacccgatataatctcgatttaacccccgaacagtacctacaacaaattaacggtaaaaccggccaactgttcgcgctcagttgcttcatcggtgcttacgaaagccaaaaaggcttgaagtttgcccgccaagccgagaaaatcggcttaaatatcggtctcgccttccaaattctggacgatatcttagattacactcagaccgatgtcgattttggcaaaccagttctcgatgacatgcgacgcggcgtctactcgattccgttaatcatggcactgcaatccaatcgccaaacattagcaccctacttggaaaaacaagcagctatgactgatgccgatgtgcacgctgttcaaggcatcgtccgtcaatctggaagtgtcgaaaaagcccaagcactcgcacaagattacacaaaccgcgcactcgctggtcttgcgaaactacccgacatgcccgcaaaaacaacgctacaacaattaactgaacgtttattaaccagaaaagcctaaaaaagacggacaacatgttagaaatgttgtccgccttttattctcgacttaatgctcaaaagttgaccaagcttgaatgcactcattttttaacgtgctcctcgaacagtcttctccggttaactgcaaaaagggcattatggcaagtcccgccataatgcccttttccctgttaatcctcaaagcctacccagttcgagtcacactctttttttaagctgtttatcggatttgaaccgacgacccccaccttaccatggtgatgctctacctactgagctaaaacagcatttcacggttgattaacaaccgtgatataagtatatcgaaaaataaaaagcgggtcaagcccctagagaccaacttctgtatcagaaagtgctaattcaaaatgttgttgtaagaatttagcgaccccgtcattcgtattcgtttctgttacataatttgcagccgctttgacctctggtaaggcattgtccatcgcaacactgtacttcgctgattgcaacattcccaaatcattttgcccatccccaaagacaattgtatgatcggcatcaattccatgaatcatttgaatctggcgaattgcagtggctttatcaatcccggttggaatcatctcgatgttgtctggaccagaagaagacaagctcatcacagcttgatccattaatcgttgtttagcggctgctaaactctctggatgaccgcgaccaatgataatcccgttagtaatctgatcacttaaattcaacaacatttctaaatcagtcaccggttgattatcaatatcggcattcaacaataaattccccgcatcgcgcgcaacaaacttggggatttcttgggtatagtaagctgtgtcagtggtaaaaaagtgcgcagataaattgggatctgctaaacatgcttcgtaagcagctttgagcgcttttttacctaaataatgcttgttcatctgatggccattttcaaagacagcaccgttagaagccacaatccggacatcatcgttaatttgccgcgaaattacccggccaagattgtacattcggccggtggcaatatagaaaatcacatcgcgtttttgtaatgttcgaatcacgcgtttggtcaaaggtgtcacgatttgatggtcaaggaccaacgttccatcaatatctgaaaaaactaagtaaggttccatatgaattcccctcaattttgatttgtaaccggtaacacttcttcgttttagcgtatttagatggggaattaaatagccaatttcgtttcattcacaatcaaacgattaatttatagcagtaagtcttgctatttaccatgacatagtttattatcaccttatttggtaattttaataatgtctgaaggagtttttggctatggataaagaaaatctcaatatcggtgatttagtaaccggcaaagtgaacgaagacctagatggtgcatttacaggaactgttgaaaaagtatatgaaaactccgctttaattagcattacggatttcgatgcagccgacaaggccaacgtttcggaattaaacaacaagatcgttgttaacctcaagcaattaaaagctgctaaagcaaaataaaatagaaaaaagcccaccgacatttatttaccggtgggcttttttctatgctttaatttcgctgacttgtaaagaagcattcaataactgttcagcaacgagcgccaattgctgggcgtcaaacgctggtttaaacaatgcagtgtgcaaaacaccgattagaccccaacaacaataattcaaaatataatcagcgttttccggctgctgaaatggaatcacccgcttgccgtgagtcacggtcaacgcaactaatttattcattaactgtgaatcgggattacgacacaatacccgtaacatagactcgttgtcttgcacatatgacaagacccatctaaagaaagtttggccaacaatctgtggttcagaaggcaactcaaaacgttctagcaactggctgaactcatttaaggtaaaatcttctgtctggcttaaaagatcgtagatatccgtataatgcaaataaaacgtccgccgattaatatcagcccggtcggcaatcatctgaattgtaatctcattaattgggtgttttagcaggagctcaataaaacttgtgcgaattaacttatgtgtccgtttaacccgtctgtcttgcagattaaccatctttcagcctccatttacatcacaattgactaacttgtgtgcattataacacagaaacacttagattgattattgttgaatcaactaaccatcgttatagtagccttaataacaagtcatcggaggtcggcatatgtttctaacaatccaagaattacgccataataagttaaaatttggcgcactgagttttatcatctttttaatcgttttcctagtactcttcatcaccggactagctgccggtttagcaaacgatagtggcgcggctattaaaaatacgccggcgacgcattttgttttacaagccggttcggaaagtcggttgagtcgctcggcactcacccaatctgattggcaagctctcaaacaccaatcactgacacccatcaacgtcacccaagccaccatcgagcggcctaaaaaacaaacaaaaactgacattgcctacattgcagttgacgctacgagcttcatgacacccaaagtcacccaaggtcaaaagctgtccaaccaagccacccaaaaagtggtggtcagcagcaagttacaagccaatggttaccaattaggcgacacctttaaagacagtaccactggtcagcaatttaaaatcggcggctttagcaagcagatggcttatgcccatacgcctgttatttatttaaaccaccaccagtggcaaaccatttttccaacgcaaaagacgacctataacgcgtttgctagcaaacggcccttgtcggttaacaagcactaccaagtgatcagcaaacaaaccttgattgataacatccctggctactctgcagaacaaagttcattgtacttgatgatcggctttttatacgtcatctcactgtttgtcctcgcaattttcttttatatcattaccctacagaaattacgggactttggggccttaaaagcattgggcacaaccacacgctatctcagccagcacatcatctctgagattggcttgttaacggcagtggcgattcttttggctggcggtatcattagtgtcatcgcccagtcaatgcctgccagcatgccgtttatgctcacagcaccaacgatcatcggcaccagcgttctatttttagccgtcgccatcctaagcgccctattatcccttattcaagtgattcggattgacccgatcacagctattggaggtcattaatatgtcagcaccgattttaacactcgaacacatcaccaaagattatcccgatggtgatcaaattaatcacattttaaaagatatctccttcacgattcagccaggtgaatttagcgccatcgttggtcccagcggtgttggtaaaagtactttgttgacgattatgggcgcgctcttgcaacccacagccggtcgtgttaccttggccggtcaagaacttgcaacactcaatcgtaatcgtcaaacacaaatccgccgcgaatcaattggttttatttttcagagttcagaattaattccctatctaacggtcactcagcagctgacttttttacaaaaaatcgcccgtcgtcgcgatcaatccgccgctgaacaattactgacacaacttggattaggccatcgattacatagttatcccgctatgctttctggtggtgaaaagcagcgggttgccattgctcgggcacttatcaatcaacctgcactcattttagcagacgaaccaaccgccagtttagatgcgcaacgtggtcgtgaaattgtccacttaattcgcgatgcagttcatgaacaaaaacgcgcagctgtcatggtaacacatgacgaacgggttttagatctcgtcgatcacgtttggcgtatcgaagacggtcaactccgccaaaccacataaaaaaaacggtcctttcacaacttagcgttgttgaaaggaccgttttttagttccagaggatagctactattattcgacgttttcaaatttaccccacaagttcattgtggattgaatattaacaaaggcattcggatcggcatccttaacgacccgttttaattccgttagatcgtattttgaaacaactgtcatgatcactgttgtttcttggttggtatacagaccagttccatctaattcagtcgcaccatgaataaagtcacgcattcgcttcttcaattcttcaggtcgcttggtaaaaatcgtcacagtcaccttttgttgttgaatatagatataatccatcaacaagcttgaaacaaagatttcgacgatactgtataaggcagcaccccaaccaaagaagatgcccgctgcaagaatgatcattccgttgatgatattattcacaacaccaacccgtttgccagttaagcgcccaactaacgtcacaatgacgtccgtgccaccagttgaaaaacccgctttaaaacacaagccaacccctaaaccaatcaatgcacccccgaacaaggcacctgcaaatcgttcggtgacaattgggtgaacaggtactggaatgaccttcaagaaaaggacactcgtaaaaacagcgacgatactaaaaatcgcgtactgatgattaatcttgaaccatgccagaatcaataatggcacattcaaaataaagaccaacatcgcaacacttaatgagccgcccatatagctgactaacgaggttagtaattgggcaatccccgtgaccccactcgaatacgtcttcgccggaatcaagaacagattaacactcaccgccgccaaaaaaccgtataccatcgcgataataatttttttcgaatttccttttaaagcaatcactgtagcacctccatcgattaaaaaagccacactccccccttggaagagtgtgacaaatgattaaagtgcgcacttggctataggttcttatccatgacgaaggtcaacttagaaagttgcgttccttctgtcaccaattgcgctaacaaatcggttgttgcttcatggtaatgtgcagcaatttcatgattttgctgggttaagaaatcagtggcattcgcttccgcctttacagcagcatccaccgtagcaatcttagttcttgcccattctgataatgctttttggtagtcaatatcagctttcttaaaggccccgtagtgtgattcaacaatcattgctaatgcttcatataaccagtaagcgttcttcaactgcatcttcgctggtagttcgcgataactttcatccgtatccatcgcattcgtaaagaatggtacgtgtggacagaatgttggtacccccaaacctaaccattgaacaccacgcacagcatctggcacattgtttctaatctgacagatatgtgagttttgcgtccgtgaaagtgaaattgaccgataaatcgtcttttgttcttctgtcccattaccaagtggatcgtaaatagtttcgttataatgtgattttaacacatattgaacatcctccacacttattttacggttagccttgcgaatgaaaggcaagtcactcgattcaggttcttgtttgatttcagggttcaaatagcgttgtgcataccaaacccgtggtgtgttatagtgacgatctaattcagtatccgtcccaaaaatcttacggaagttccattcagcttcactcggattcaagtgattttcactgacgaattcttgaataccttctgaccacatgtaattttctggatcattaaagtcgacatcttcgatggcaatttggttagcggcaactgcataacaatcatccggaatccgaacagcaacccagtgatgcccagtaacaatttcttgataccaaacttcattttgatcactgtattgaacgccattgccttcagctgaaccgtatttagcaatcaaatcccccatcaattgaaccccttgacgtgcagaatcgatgtatggcagaaccaacgtacacattgaatcttcagctaaaccttgcttgaccaacggatcataagctaatacccgttcgttggcataaacactttcagttgcggagagggcgacatttttttcattaatcccgtcttcttcatttaaaccatcacttaaatcgccgttgggggttgatgtgtaacgataaccgtccgtcggtaacggcatggttaagccgttatattttgaaacatatgtctcatgtcgatcatgaactgctggttgtacgaagaaccgtttaggatggattgcatagaagcgatcctcatttcgcgaaatcatcgtagagccatcaattgacgcattcttccctaccatcattgaagtacatgctgataattcgattctgtctgtcatttgaaaaactcctttttattaaaaatgtgattcactaattgattaataaaacttagtcggttacccgccggatcaaatgttctgtgtgttctagatgattcaaatacacgagtaatcgttcatacaggtattcaccggcttcatcatactgtcctgccagtgcttggccaatctggtggacactgcgttttccattcacatgcctaaagacaaaactaccataatcatcaagttccagctgtgtttctagcggaatcttcacatgcaaacgccgtaatgtccgttgaatccagtgattctgcggccgaataatggtgacctggccagcttgtaacttaaactgaacttgcggatttttttcatagatgagttgttctaaatcaatctccgctttctgtcgtcccatcttctgttgcccctcctttatgaatcatcataagtggcacagtaatcgaaacaaccatgacaaccaataagataatccccattgcattggtattcgcaaaaccagtaatcacgcgatcttttaacacaccggttacgtggagaataatcccgattaaaccaataattgaaccaccagcaattaaaccggatgataaactaatcccactttgaacccgattattcttaatcgcttcatcacgcgttgctttttcaataaagactttaatcaaagcaccgatcaagatgattgaagtggttgaaattggtaagtaaaaaccaattgcaacggtcatgattggtaaatctaaaaagtagaaagctaatgccatcataaccccaacgataatcatgatccatggtaatttacccgtcataatcccagatgttaatgtagcaattaagttcgcttgtggtaacccaaaggctggtgttgcactatctgtaacgaattgtggtgataagatgctgattgtgccgacagttacgattacgccgacaatcccggcaatcatgaaatatttcatcatttcagattttgaaccaccaatgacatatgttactttttgagattgcatgtagccaccaccaacagcaacggcggtcacaacgaatgtcccgaacatcaataagatttgcgtatggttattgtccgtccaaccaaataatacgaagactaccgtcataatcactaatgacgcaattgtcatccctgatacaggcaagttagaacaaccaatcgtcccagcaacccgggctgaaacaatgacaaagagtaaacttaagatggctgctagtaatgcaccaacaatccccattaagaagttttgcgcaatgataataccaataacgaagatcccaacaccaccaacaacaatggcaatcataccaagtgtattcttttcttcgcctgctacgtttttagcagctagtgttttcttgattgatgtcacgatagttgggattaatttaatcgcaccgattaaaccaccacaaagcatcattccggcaccaatgtatttaacgtatgaacttgataaatcgttaacggccatttgattcacggctaaactcgtgttattccaaacatgcgcactgttgcccgccatatctgtgaaataaccgattaacggtgcaatcgcaaagttggataaaatcgcacccgcaaacattgttaatgacacttctaatccaacgataaaaccaattcctgcaagtaatggattcacttcaacgtccaatttccatttataaaatgatgaaccaacgtagctaatcatgttgttgacgacaccaaacactgatgaagttagcatcgtaataaccccaccgataccaaagccaacgcccatgtatttaagcgaatcgccaccagtatctgacgcaactaaggtttctgaaatcgccatggcttctggataaaccaacttaccatgttcttcaaccattaagtagttgtgcactaatgaggctgtccccattgaaaaaagaattgcgagcaccccaacgatgatcccttgaatgaagttgatgtggccaccaattaaaataatagctggtaaaacataaatcatcccactggcgattgattcaccaccactggacatcccttgcataatattcttgcctaaaatcccttttgatttggcaaaggcgccgactaacccagacccaataattgaacctggaatcccggctgcaacggttaaaccggccttcatcccagaataagctgttgaagcagcaaaaataatggctaaaatgctccccattattagaatcgctaagttgccgacctttttgtcgccttgattgacatacggtacatatttctcacctgaaacaccgccgtatgcggattttgaaagtttcttttgcatgattgctcctcctaaaagtcgcttttatttaaggctcttatccttaccaaagatttgcatcttcaatgcaaccccggttggtgtagcagctaatccacctaaaccagtttcacgtaatgtagatggcatatcttcaccgattcgtttcatggcaccaatcacttcatcagctggaatcttgctgattagccctgccaatgccatatcagcactggtcaaggcatcgacggccccaatcacgtttcgtttaacacatggtatctcaactaatccagcaacgggatcacaaaccaatcccaatagattagacatcgccatcgcgaatgcttccgacgattgttgtggtgtgccaccagcagcttcaactgcagcggcggcgcccatcgcggcagcactccccacttcggcttggcagcctccagttgccccggcaatcatcgccttattggcaacaatcatcccaaaggctgacgcacaaaacaagaaccgaatctgcgcatcccgatcaagcgccaagcgctcagtaataacagataaaacaccgggtaaagtacctgctgaaccagcagttggcgttgcacaaatgatccccattgaagcattgacttcattggtagccactgcattttgcatagcggtcaacatcacatcacctgataacgactttcccttttcccgataccgcttcaacagaaccgcttcaccgcctgtaatcccagtggcagactgaacaccttcaccggtcacgcctttttcttcggccgcaatcatgacatccaagtttttccccatggttgcccaaatgacctcacgactagtgtgactcatcgcaacctcttgttcgataatcaattccgagattggtagttgccgttcttgcgctgtttcaactaattcgtgaattgttgtatacatcttcccaccactttctataacacaataacgtcttggctcattccgcggacctgttcaatctgttccgggtacggcttatcaatcagttcgattttatacaaaaaccgatctggcactttaaccgatatgcgcttatcacgatagttaccttcaaatatctggtctaaagcatcgccgatttcttgttccgattcgacaaaaaccaatggtaacgggccatccgttttaatcacaatgccattcaaattgacttggcggatttcgatggtcccgcccccaattgaacagccccaaatcgttagttccttctcacgattgattaacgttaattccgctgtattgggatggtgcaccggactattccctggatcttcaatgaagacaacgtcaataccttgacgtcgcgctaaatcaactgccattggtaccctttgatcagccggatcgaatcctagcacgccactaataattgcataatcggtaccatgcccttggtgggtttgtgcaaaagattcgtagtaacgcacaataactttgttaatcggtgcatgaaaaagacgattagcaacatgtccaatggcaactgcgccagcagtatgtgaacttgaaggaccaatcataatcggtccaatgatatcaaaaacgctccgatattgatttgtcatgttctcctcctactttctgagatagcattaacaaataggactacttatccaataaatcacaatctctatatctgtaccataacacaaaacaaacacggcttcatgatattctaataagcaactttgtgaaaaaatgagaggattcttagatttatttctaaaacgaatcccacaattagctttgcctatttaaaggttgccatcagccactttcaagattatataccctaaagcacactcattttttcgcaaggtgccgaattttattgtactacaacacaggtttttaaatccactatctttgcgtcactgttcaataactactataatggacagcacacacatttatattggaggttttactatgcggatttttgttattggcgcccatggtaacgttggccagctcctaattagccaactcgttgctgccggttgcaccgttacagccggcattcgtgtcgaacaacaggcggatgaacttgcacaactaggggccacgcctgtcttattcgatttaaccaaacaacctaaggctttagcaccactatttgccgatcatgatgcgattgtctttacagctggttctggcggtaaaacaggcgatgatcaaacactgttggttgatctcgatggcgccgttaagagtatggcagcagctaagattgctgaagttagtcgctacgtcatggtcagtgcactctttgttgaggatcgaactaaatggcctgaaagtattaaaccgtactacgctgcaaaatactatgccgatcactggcttgaattctctggtttagattggaccatcttgcgtcctgggacacttacaaacgacgaagctaccggcctagtgacaatgcaaccatctggtgggcaagttgcacgtgctgatgtcgctgcgatgatttgcaccgtcttagaacatccgaccgaaacaatccacaagaaattctcgtttgttaacggcgacttgcctttaatagacgccatcaaaaaagcagactaaattagtctgcttttttcgtagtcttttttttggtggttgttttcttagtcgttgttttttgggtagctgtctttttagctgttgtcttcttggcaggcgcttttttcttagtcgttgccattttcttaggtgcggctttcttcttagcgggcgccttcttttcgactggttcttctttaggcgcctgtgaaccgattacgacggcttccaagtcctttgttagcaagtcggcaatcttcgtccaattagcagctgccgattcttcaaacgaagctaccgtcccaattaagtcaatccgcatgttcgagcgattaatgagtggcgatgtcacatataaataaagattcacctctgcttggtcgtcgagttcaaaaaattgatttacttttttaatgtattgtaatggtagattcacaatccccgtttccaatgtcaccttaacgggttcgccagcatattctgtcagcaccgaaaaagaggccaaagcttgtttttcaatggctttatcaatagcgagttttaactgtgccaaaataccgtccgccacaaaaggatctggcgtggggagctcgtattcatccgttaaatatgtttgatcttgaatttgattgataaatgcttgtacttctatcttcatctcgtcagtccttttttaaatctctacatatcatagcttatttagggctaaaatacaaaaaacatcccacctaggtgagatgttcgcttaattgcaatcattaaaagacacggcgtgcaaaacttggtgcatagtattgcattgaaccgatcttaacgttttcgccaggttgtggggcatgaatatattttccgccaccaatgtatagcgcaacgtggtgtgagctaccttgtgaaccccagaataataaatcgccaggttgcaagttgcttaatgaaacagcataaccggcactttcttgagggactgtccaaccaccgatactcttaccagcagcatttctgaagacatagtccattaatccagaacagtcaaaactacttggaccatgggcaccccaaacgtaaggtttaccaatttgagccatcgctaaattaataacagcttgcgcattaccagtcgttgctgcaggtgccgttggggctggtgttggtgtcgttacaactggtgccttttgagttggggctggtgttgtttcaactggtgccttttgagttggggctggtgttgttgcaactggtgcagtttcttggacaggagctgatgattcttgagtagctggttgttgtgtttgagttgtactttctgcttgagcaggcgcactactttctgctacagctggtgtactttctagtgtggcaggcgtttcaactggtgttgattcactttctgcgacaggtgctggtgttgtaggcgtgctttctgtttgcgctggtgttgttgcaactggtgctggcgcagctggtgtttcgacaggagtcgctgttgcaggttgtgctggtgctaccggttgtgcaacgggcgttggtgtggcttcaatcttaccatcacctgtaaagcgagctggtacccagctaccattttcaagttgataccattcttcgccagaaacagtttctgttttcacaacgttgacggtttgaccataacctaagtattggcctgttggggctgtataagttgctgttgaccaaacagttgttgcgccaccggcataggcaatccgagctgtcttttgagcagcaggtgcttctgttgctggtgttgtttcagctggtgtagcgtcactggttgttaagtaacgttcaggtacccattcgccgtttccaattcggtaccatgtttcagcgccaatcttttgtgatgctaaaagatttactgattggcccttaaagatgtatcgtttagcagtttgaccagttgttggacttgtccaaacagttgttgcaccatctgcgtagttgacggttgctgtcgttgctgcttgtacttgccctgcactcaataaaccgatcccagctgcccctaaaattccagaactcaatgcaatcaaactctttgtgttgttcattaaactgtctcctgtcgataaattttttatttgtgttttcttaatcatcgtaattaattcataactaactttgcaaaaatttaatttctaagtgcaattttagcacagacccgagtaaacattcaagtaaacactatgaacaactgtttaagcatgcaacaaaaaaagcgccactacacggtttgtgcggtgtcactttttttttaattaatgggcaacattgccggccacattcagtgcatcccacgttcttgcaaacggtggtgcataaacaaggtcgagtaacccgagttgttcagttgtcatcttcgcttggatcgcagttgcgagtacatcaacgcgtaacactgcgtctttttgaccaaccacctggccaccaattaagatatgctctgctttggtgtaaatcaatttaatcgttaaatctgattggcctggataataattcgtttggttcttgtcgtggattaaaacagtactgaaatcaataccagcctctgccgcttctttttcagtcaaacctgttcggcccgcttctagcgtgattaatttcacaccggctgaattcaacatccctggtaattgagcggcttgcccgcctaaattcgtgccgacaattcggcctaatttattggcaccagtggcaagtgctgaatacatcggttggttcgtcacgctgttaatgaccgttgcattatcgccagcggcatagacattttcaatcgatgtccgccctgcttgatcgacaataatcgcaccatttggcaacttcttcaatcgatcatccgtgatgaattgcgtattaggccgaatcccagctgctacaatcactaagtctgtcgcatactgccccttatcagtcacaatgccagtcacctgaacagttccttctaaggcttgaacagcttctgataagtgtaattcaatgccgttatcacgtaagtcatccgcgaacatgtccgttagttctggatcaaaagccagtggtaaaattcggtcttctagttgaatgacccggacttgcttccctaattgatggaactcttcggcaatttctaacccgataaagcccgcaccaatcaccgttacagattgaacctttggatcttgtcctaattcacgtaaggcttgtccatctgccatcgtccgtagatgatagacgtttttgagatcaacatttttaatcggtggcatcacagctgtggctcccgttgctaacattaattgatcataagattctgtgcgatcttgattggttttcaaatcccgaaccacgattgtttgcgcatcaaagtcaactgatagtacttcgtgttcaagcgcaatatcaataccttgttgagcaaatttttcaggtgtccgggcaatcatttggttgggatcttcaaagtgctcgccaacaaaataaggcaagccacaagccccaaaggacacatagtcccgtttttcgtataacgtaatgtctaaatctggattcgttctttttgctttcgcagctgcacttgttccggcagctgtggcaccgataataatcgttcgcatcactaaaccctccattttttgaaattaagccatttcgtctgaatcttccgtcaaactcatatcattaaacttgttcttatccaatttacctaataagtgagccgttaagaccccagcagtcattgagccatcaacgttcaaggctgtccgacccatatcgattaatggttcaactgagattaatagtccggctaacccgactggtaagttcattgaagaaagtacgattaaagcggcaaatgttgcgccaccaccgacaccagcaaccccaaaggaactgattgcaacaatcaagattaatttaaccaagaaaccgatgctccaaggattaatcccaacagttggtgcaatcatcacagctaacattgctggataaacacccgcacagccgttttgaccgattgaagccccaaatgaagccgataaattagcaatcccatcttcaacccctaaacgtttcgtttgggtttcaatgttcattggaattgaacccgcactcgtccgtgacgtgaacgcaaagattaacgttggaatcacttttttaatgtagttgattggatttaaccccgtgaacgcaattaataggaagtgaatcaagaacatgatgattaatgccacgtaagaggcaatcacgaactcgcctagactgagaattcctttaacattagtttgtgctacggtcgttgtcattaaggctaacaccccataaggtgtcatccgtaaaattaaggttaccatgcgcatgataaccgcgtacaaggcgttaacgattttattaaacatttctgcttgttccggctttttacgccgtaattgtaatgctgccacccctaagaaagctgagaaaatcacaacagctaatgttgatgtaggtcgtgaacccgtcatatccatgaatggattttcaggaatgaagctaacgattttttcaggaacagtttgttcctgtacatcgcctagcttcgtttgtaattctttcgagcgggccttttcgacttggcctgattgaatatcactcgcatttaagccgaaaacatccgctgtcactgaaccaactgtggctgcgattaaggttgtaaagattaagattccaatgaccatgccggccatcttccctaagcccttagatgattccaagttcgtaatggcttgaataatcgaaaccatgactaacggcataacgatcatctttaagaacgagacataaccgttgccgacaatgccgatccaatcagctgtttgtttgacaaccgttgaatctgctttgaagataatctgtaagagtgcaccgaataaaatcccgacccccaatgccgtgaaaacgcggcgactaaacttaacgtgaatccgggccatcttgtttaaaacaaataacatgataagcatgatcacgatgttgatgacgacatatgtaattgtcatttctttaccccattccatttttaatacttacttattgtaaacgatagtgattatttttgcattagataagccctaattctcataatttatttcataatggtaattgcctagtgttaactcacgataaaataacagttttatttcagaaaaatgggttattaataatgcatgggcttctttcaacaaaaaaaggcgcagacaaaatcaatttgcctgcgtcgctattcatgattatgctaggtcatccccattggtggcgattaccttttggaaccaatagaaagagtccttcttagaacgagctaacgtccccgttccgtcgtcatttttatcaacatagataaacccataccgcttcgacatttgtccggtgcctgctgaaactaaatcaatacagccccatggagtatagcccatcaaatcaacaccgtcatcttccacggcttttttcatctgaacaatgtggtcgcgtaaataatcaatccgataaggatcgtgaatttggccgtctgcttcaacgtgatcaacagcaccaaacccattttccacgataaattctggtaagtgatagtgatcattgaaccaattcattacataacgtaggccaactggatcaacttgccagccccattccgatgccttgacatatggattaggtactaaatcgtattcttcatcataatgaagcgttgtttcacctttgtccttggttgcaaatgacatgtagtaactgaagccgatgtaatcaactgtccctgcagccaattctttcaaatcatctgcggtaatgtccaaatcgtagtgttggttcttttgatattgtaagagccattctggatagcgcccatgacagtgtacgtcagcaaaccaataacgggtttgcattgcgcgttctgccttgagcacatcctctggtttagctgtcagtggatagatgggacacatcgcaatcatgcagccgatttcgaaatcaggattgatttgcttgccaatttgtacagcttttgcactcgcgactaattcgtagtgggcggcttgatacatcactttttcagcatcttcaccaggttgaatctgtaacccagaatttgtaaataaggcaaactggctgtggtaattggcttgattattaatttcattgaacgtcatccagtacttcactttattacgataccgtttgaagaccgtttcagcaaagttcaagaaaaagtcgatgactttgcgattacgccaaccaccgtattccgtgaccaagtgatatggcatttcaaaatgcgagagcgttacaactggttgaatatgatatttgagacattcgtcaaataggtcatcatagaatttaaggccggcttcgttgggttgtgcttcatccccattcggaaaaatccgcgtccatgcaatggatgttctaaagctcttgaaccccatttcggcaaataacttaatatcttctggataacgatgatagaaatcaatgccttcgtggttcggataattgtgccccggttgtacaccatctgtaatcccccgttgatgattaacatccccggcagtcatcacatcggcaacactaatccctttgccatccgcttgccaagcgccttccaattgatgagcagccactgcgccgccccataaaaaatcttttctaagttgtcccatgttgacctttccccctatttagttgttgcaccttgttctgaagcatagtttaaatgatcttgtttccgaataaatggtaagtacgtaaagaacgtcatgagtaacattaaggcttgccacaatgcggtcttccacccaccgactaataaaccagaaatgattggtggtgtcgtccatggtaccaacgttccggggaacattgggattaaaccgacccgaatcgcagtccacgttaagattgctgatagcattggtgtcacgaagaatggcaccatcataatcgggttcatcacgattggtgtggcgaacaaaatcggttcattgatattaaagactgctggtgctaatgataatttccctaaatctttgaattgtgctgatttggcaaagaatgccatgtaaacaacaatcccaattgtcatcccagcaccggtcactgtcataaattgatcaagtaattgttgcgtcacaatgtgaccaccgttagctaacgttaatgctttgcctgaatccaagattttttggttagccagtgagttggcttgcaataaaggccccataatcccaccaacaattgttgaaccatgcaccccgaagaaccacaagaatggtactaagaaagaaatggctaacatgccaccaaatgaatcggtaattccttgaagtggtgcttgaatggtattgtaaattgattctgttaaggttgagtttgcaaccttgtcgaagaagatataaaccaagagtgagccactaattaaaacagcagctggaatcaaagcggtaaaggaacctgcaacgttcgcaggcacttgttctggtaatttaatccgaatatcatgttttaagaaagctgagtaaatccaaccgactaataaaccgacaataatggcagtaatcatcccttgtccaccaagccaagtccgatcaataaacccggtttgttgactcatcattttaacagagacaacaatcttaccggatgccgaaacaatggcagtgcttgggcgcgtcactaataagaaacaaacaatagcaagtaatgaggctgggaacggatcaaaaccttcatcctgaacccaagaataagcaatccccgcaacggcgattaacgccataattgcaaacgatgcgttataggcaacgttccaatatggggtcaaaccagttgaaaccatccaatcggcccaactcttaacaggcaagttggctaaaactaagaaaatcgatccaacgattgtaaggtagattgcaaatttaatccgaatttttggacaaatttgtcagcatagattgccgcaagtgacaaagcacgcgaagtcttaggttggacgccacagtatgacaatatgaaagcaattattgaaactgcctggaattggcatttaaatcatccagcaggatacgcagatcggtagaggaaagcatatgcaagcaagagaattgattcaaacatttattgaaaaagtgattatctttcaagacacactttataaagcagaagaccaacagtacttatttaatctcgtcttagaccttgttggtgaagaggacagtaacgttgcggtgactgatcaaagtctcatcggattaaaggacgcgttgttgcgtcttgcagttgcgaatagccggattgagaatttagcggcagaacaagatattttaggggcgaagttgatggatttggtgacgccattaccaagtgcggtgaaccgccatttttggcatcaatacgagagtgatccccaacaagcacttgccgacttttatgaattaagtcgggccaacgactacgttaaagtggccgcaatcgcgaaaaatatcgcttatcaagtgccgacgcaatatggcgacttagaaatcacgattaatttatcgaagccggaaaaggacccgaaacaaattgcgttagccaaaacgatgaaacaaaccggctaccccaaatgtcaattatgtctggaaaatgaggggtatacggggcgtttagatttcccagcacggcgtaatcatcgcatcattcgttttaaattggcaggtcagacttggggcttccaatattcaccatatgcttattttaatgagcattcgattttccttgatggtcaacatgaaccaatggtgattaatgaaacgaccttcaaaaatttattacagattgtgaagcagttccccggctatttcgctgggagtaacgctgatttaccgattgtcggtggttcgatcttaacccatgaacattatcaagggggtcgtcacgattttccaatggctaaggcgccaatcgagacaccactacattttaacgggtataatgatattcaggcgggaattgtgaagtggccaatgtcagtcattcgtttgacgagtgcgaatgcaacgcatttggaaacactcgctgcacaaattttaactagttggcaaaattacagcgatccaagtgtccaaatcttagcccactcagaagacggcacaccacatcatacgattacgccgattgcgcggatgcgagacggtcaattcgaaattgatttggtactacgcgacaatcaaacgtctgcagaacatccagatggaatttatcatccacatgcagatgtgcaacatattaaaaaagaaaatattggtttaatcgaagtgatgggcttagcaattttgccaccacgactcaaagatgaaatggctgaggttgaacactatctctgcgatcaaccaaaccagatggccgcttaccatcaagaatgggcagatacgattaaagccgctaacacatcgattacatcagataacgtaacggaattagtgcggactgaagtcggcaaagtgttcatgcgcgttctagaagacgctggtgttttcaaatgcaacgaacaaggtcaggcagcatttattaaatttacgcaacatgtttaacctataaggaggaacattcatgaagtattggcgagaagcatttggcgaaataaatggtcaaacggtttggcagtattggctagagaatcgtcaggggtatcaattagccgtgacagaatacggcgcaacgattactcacttggtgatgccggatcaaagtggtcagatggccaatgttgtgattggctatgacaccctagcggattttgtaaagcaacaagcttattttggtgcgacagtgggacgcgtagctggtcgcatcggtcaaggtgcttttacactcgatggtcatgattatcaagcaccgattaataatggcgccaacacgaatcatggtggccccaatagttttgaatcgcaaatctggcaatcatcagtggttgaaaaagatgatgcgattagtgtcgttttcatgttaacgagtccagatggtgaaaatggattccccggtaatttagcggtgaccacgacgtatacgctaaatgaggccaatgaatggctaattgactatcaagcaacgactgataaaaccacgttgtttaacccaacatgccatgtctatctgaatttgacgggggactttgatcaatttgttggccaacacacattgcaaatcgatagtgaccgttttggtgccattcaaccagacggcttaccaaccggggaattagtcccagttgcgggctctgtctttgatttacgtcaaccgcgagctttgcaagccgcttttgatagtgaaaatacgcaaactaaattggtcggtggttttgatcatccattcctgttgaatcaaacgccgggtaaagcggatgcgattttacgcgatcccgaaagtggccgctcgatcacaattgatacagaagggaatgcaatcgttatttataccgccaatggcttcggggacgaaccaaacttaacaaatcaggcaattcaaccccaccaagcagtggcgattgaagcccaaatgatgccagatgccatccatcataccgagtttggtaatattgttttgcatcctggcgaacaatatcaacggcggacccgatataaactcaattaatttattttacgcttgcatgcggttacaaaatcgcgtataattgacttgtttagatgaccgattctggtggctagataataattgtgtatttaaaggagtaacatcatggaaaaaggaacagtaaaatggtttaacaatgaaaaaggtttcggctttatctcagcagaaggtcaagacgatatctttgtacatttcagtgcaatccaagacgaaggcttcaagtcattagaagaaggccaagcggtcgaattcgacatcgttgaaggcacacgtggaccacaagctgcgaatgttgtaaaactttaatttagaggaattaaatacgactattctaatttaattaaatttaaattagaataaaatcgttcatgtttataaaaaaatagcataaaagtgttgacttcatttatcatgtgaactatgataagcacataagttaataaagcgattgaaaagcgcagtagaattagtaaccactattacagagagtcgggatttggtgagacctgacatatgtttctaagtcgaattacactttttgttttatcaaatcgtacgttgaatttacgttaaaatctagagtgatattttgaaagtgcactttcaaaatataacacgggtggtaccgcggaaaaatgacatttcgtcccagtaatctttattttattaaagattactgggacttttttaatttaggaggaaattttgatgagaaaaaatattattgatgaattaacatggcgtgatgcgattaaccaacaaacagatgctgaaggattgcgtgaattagtagaaaacaacaagatttctttatactgtggggctgatccaactggtgatagtttacacatcggtcatttgattccattcatgatgatgaaacgattccaattagctggacatcacccatacatcttaatcggtggtgggacaggatcaattggtgatccaagtggtcgtaattcagaacgccagttacaaacaatggaaaaggttcaaaaaaatgttgaagctttatcaaaccaaatgcggaaattatttggtaaagatgccaatgttacttttgttaataactacgattggttatcaaaaatctcattgttggactttttaagagattacggtaagaatttcaacatcaatacaatgttagctaaagatattgttgctagtcgtttggaagtggggatttcatttactgaattcacataccaaattctacaatcaattgatttcaaacacttacatgatgaacataacatccaactgcaaattggtggggctgatcaatggggcaatattacttcagggattgatatgattcataaacttgaaggtagcgacgaacccgtatacggtttaacaattccattaatgttgaaagctgacggaactaagtttggtaagacagcaggtggtgcaatctggcttgacgctgaaaagacttcaccatacgaattctaccaattctgggtaaatcaagatgatcgtgatgttattaaataccttaaattcttcacattcttagaagaagacgaaattgaagaattggcacaaaaagttgcaacagaacctgaaaaacgtgaagcacaaaaacgtttagcacaagaagtgacacgttttgttcacggtcaagaagcattagatgaagcggaacatattactgaattactttttgaaggtaatatcaaagctttagatgttgttgaagcagaacaagcttttggtaaagcaccatcagttgaaattagtaaagaagctaaaaacattgttgacttcttagtggatacaggtattgaatcttcaaaacgtcaagcacgtgaagatgttcaaaatggtgccattacaattaacggtgaccgtatccaagaaactgatgcgatgattgacccgatgactagctttgatggcaagtttgtgattattcgccgtgggaagaagaattacttcttagcacgtgttactgactagagacgttccaaaaattaaatgaaggcttttgtatctatactgaatgttactgggttcttcgtgaatgtagatcatatagtataaccccaaaatacaactgcaaaggtagccgtcaaacgttgtttgacggctatttttcgtactctaaaaaatcggaatcgctttcatatgtttgcttttatggacaatgagcgtattctattgattggggttatactatatctacaatttaggaggattttttgttatgagtaacaatagttttagtgcaaaagatacagatttatctgctctatttatcggtgataaagctgaaaatggtcaactttacaaagatttgttaggtaagttggttgacgaacatcttggatggcgtcaaaactacatgccacaagacaaaccaatgatttcagctgaacaacaaacatcacctgaattccaaggaacggttaacaacatgaaagacgttttagacgaactttcagcacgttttacgttcacaatcagttccttgacataatgctggtcgttactggggtcatatgaactcagaaacattaatgccagccattttggcatataactatgcaatgttatggaatggtaataacgttgcgtatgaatcatcaccagcaacttcacaaatggaagaagaagttggtttagaatttgcaacattgatgggttacacaaatggttggggccacatcgtagctgatggttcattagctaacttggaaggtttatggtatgcacgtaacatcaagtcacttccatttgcaatgaaggctgttgatcctactattgtagcaggcaagacagactgggaattatcaaacatgtcaactaaagaaatcatggacttagttgaagctaacggcgacaagattgatgaaatcaaagctaaatcagctcgtggtggtaaagatcttgacaagttaggtaaatggttagttccacaaacaaaacattattcatggttaaaagccgctgatattatcggtatcggtttggatcaagtaatcccagtaccagttgattcaaattaccgtatggatatcaatgaattagaaaaaatcgttcgtgaattagcaagcacagaaacaccaattcttggggttgtcggcgttgttggctcaactgaagaaggtgctgttgacggcatcaacgaaattgctgaattacgtaacaaacttgttaaagaaggcatctacttctacttccacgttgatgctgcttacggtggttatggtcgtgctatcttacttgatgaagataacaaattaatttcatacaaagacctacaaagcaaatttgctgaatacaatgtcttcactgaagaagaaaaccttgtttcagaacatacttacaatgcatatgctgcattcccagaagcagaatcagttacaattgatccacataagatgggttacattccttattcagctggtgggattgccatccaagatattcgcatgcgcgacgtgatttcatacttcgcaacatacgtctttgaaaaaggtgcagatattcctgcattattgggtgcatatattcttgaaggttcaaaagctggcgcaactgctgcatcagtatgggctgcacataaaacattaccattgaacgttactggttatggtaaattagttggtgcttcaatcgaaggtgttcgtcgtttctacaacttcttaagtggtctagaatttaaagttggcgacaagacaattgaagttcatcctttaacagatcctgacttcaacatggttgactatgtcttccaagaagaaggtaacaacaaccttgtagaaatgaacgaattaaaccatgaattctacaaccaagcttcatatgtaactggtagcatctatggtaacgaatacctaacatcacatactgacttcgctattcctgattatggtaacagcccattcaagtttgttaataacttaggcgttactgaagaaggctgggaagaagctggtaaagtaactgttcttcgtgccgctgttatgacaccatacatgaacaaagaagaaaactttgattactttgctcctaagatcaaacaagctatgcaagaaaaattagaagcaatttacgaagatcgtaaataattctaagtaattgtttagtaaaaagagaaagccgcgcaagcggctttcttattgtgagataaaatcggaggaaaagtaaaaatggaaaataaacaagttaataaaattgccttaggaacctttattggtttaacgatggctttatgtgcaactgttcgtagtattcctacgttagctgcaacgggctgggctcaaatcagttattcaatctttgcggtattgttctttgcattaccaattgctttgattgctggtgaattagggactgcaatgcctgaagaaggtggcccacaactttggattaaaacagcgttaagtagtaaattaggtttcgttgcagcatggttactttgggtacaaatgttcccagggatggtaatggttgcttcaacaatcggacctttattgggtaactcatttggtaatccaactttagggaataaccactggtttgttcttggttgtatccttgtgttctactggattatcacattattaagcttaaaatatgatatggctaaagtcggcggcaatatcggtgtttggttaggtgtttatattccaatcgttattatggcggttatggggattgctgcattaatcaaaaacggcatcatgcctggcggtacattgggtcacttctcaatgggcaaattaattccaactaaagatggtttatcatcattgaaatatatggctggtatctcattcatctttactgggattgaaatgtcatctgtctttattccacgtttacacaacccatcaaaaacttttactaaagggattttcgtttcattaattggcttagttgtcttgaacttagtaaacgcaatgttagttgctaacgttgtaccaatgggtaaaatggaactttcaaatattacacagccaatcttaatttattgtcaaattcttggttggccaacaatgatcgccaacatcttcagtttcatggtcttcattggtgtgttattacaattatcagcttgggtaacaggtccttcaaagacaatcatccaagttgctcgtgatggttatttaccagcaaaattaggtttccacaaacaaaaccaatatggtgtttcaaaaaatgttgttttaacacaaacaatcgccatttcattatttgctttattatatggtttcatgaaagatgtcaacggcgtattcttaacgttaacaaatgcaacaacaatcttgtatgcaattgtttacttattaatcgcagtggctgtcttgaaattacgtaaagatcaaccagacttagaccgtccataccgcattggtaaaaaaaggaacggtcttgcatgggctgtttcaattgcgttgattttagggattgcgattattgtctttgcaaccttattcacaacaagcttgtcacaatcattattggttgttatcatttcagttatcttcactatcattccatttattattagtaaatataagaatgatcaatggttaattgacatccaaaaagacatcaacaaaaatagtttcaaaaaaacggtcagctgttaaaagtctgaccgtttttgatagttttgacaattgaataagttagagggtgttcaaatgacacaagaaaaaaagaaacatacaacgagtttactggaatcaattgtgattttggtcgggatgttagcttgtcttggtattttaatcattaaatacaagatgacaccacatattccaatcttaatggtttttacagtgctcttattttatggcaagtttcgtggttattcttgggatgaaattcatgatggcatagttgaagggattaaaccggggattattccgattattatctttttactgattggcgtgctcgtggcaacttggattgctagcgggaccattccaacgattatgtattatgggtttaagatggtatcggttaaattctttattccaactattttcttattgtgtactgtgattgggattaccgtgggtagttcgtttacaaccatttcaacaatggggattgcctttttaggaattgggcatatattggggttttcaaccgcattgacggtgggcgccattgtatcaggtgcgcttttagggaataatctctcacctttgtcggataccactaatttagcatcaggaattgctgggattgatgtttatgatcatattaaaagtatggcggaaacggcactgccagcagcgctaatctcgctcgtcttttatgtggtggtcggtagtagctcgaaatcagctaatatggccggcattcaacaaatggcagacgtattgatgacgcactttgatatctcattttgggcgattttacccgtcatcatcttgtttatttttgcgtggctaaaagtacctgcaattccgtcgttattaaccagttcatttagtgctttgtttatcacactttttagaagtaaacagcattacagtctaaaagtattgtgtgacatgctaatgaatgggtttgttgcaaagacgggtaatcgccaaatgaatgtgctactttcaagaggtgggatggcaagtatgttaaattcagctgccttgattatccttgctttatcacttggcggcttactgattaagtatcaagtggttgaagtgctgattacaaatattcagcagttcgttaacacacctgggaagctgattatgatgaccattgtgagtgcgactgggattaacttcttggttggtgaacaatatttgtcagttattctttcaggagaaacgttcaaatcagcatatgataaattgccattagatcgtaagtatttaagtcgaacgctttctgccggtggttctgcagtcaacgccttagtaccatggggcgttagtgggatcttcatagctggggctctcggggttaatccaattgactatgtaccgtttgcgacttattcatttattgaaccaattatcagcattgtgattggttttaccgttgttacttggcgctatagaaaaaatcaagcgaagtaatggaaacttcctcaatcaggaattatttttgattgaggaagttttttatttttaactaaaaccacggtataatagacggagtaaacttaaaagaaagaaagtgactcacagatggcattaagttatgtggataatccgcaggttcaaaaaaatcgttggcgaatattgacggctgtcggactatttaccttcatgtcgacgcttgatggcagtatcgttaatattgcacttccagtcatgagccgtgatttaaagattccgatgaatcaagcggaatggattgtgtcgatttatctgattatgatttgtgccttattattattattcggtaaaattggcgatgcttttgggaaggtcaaagtgtttaaaattggaaccctcttattcgtgattggttccttgttgtgtggctttaatggcggcttaccattgttattaggtgcacgcgttcttcaggctttaggggcatcaatgacgatgagcaataataatgggattattaccgaggttttcccactgaaagagcgtgggcgagcgttggggttaaccggatcattcgttgcgttaggtagcattgccgggcccgggattggtgggctaatcttagcgcattttagttggggctatattttctggattaacgtgccaattggaattttaaccattatttttgggcattttattttaccgaaggatattgttaaaacacatgaaaaaattgactatgctgggtttgccagttttgtagttttaattgttagtttattcctcggcattttcatcggccaacaaattggatttacctcaccaattattttagcggcctttgtcgttgccttaattagtgctggcatctttgtttggattgaacaacatgtagaacagccattattatcgtttagattgtttaaaaatatcgattttagtttgagtttactctgtgcgttcttaattttcatcgttaacttcttcttcaatgtgatttcaccattctatctggaaaatgcgctaggcttagcgcctaatcttgccggttacagtttaatgattttcccaattgttcaagtggtggtcgcaccgattgccgggagtatctcggatcgaattgggccagaaatgttaacctttatcgggttagtgttgatttcgatcagtcaggtcggttatatgttgatgaatctacaaacaccgatctggttattcatgttcttcgttggcttagttgggcttgggaatgggattttccaagcaccgaataacacgattgtcatgagttccgtcggtgttgaagatctagggattgctggtgggattaacgccctcgcgcggaatcttgggatggtctttgggatttcattgtcaacgacggttttatatgccgcaatgagtcgcaattacgggcaaaaagtgacggggtatattccaggtcacgcgaatgtgttcatcgctgggatgcatgatgcctttatggttgcgctagtgatttgtttaatcgcaacggctctaaccggttggcggatgttgaaacatcgcaaaatagcttaactattcaaaaatagcgccgctcatcaaaaagatgggcggcgctatttttgtggatttaattaacttcttttggtccgctgttagtagcggtttgaccttgggtataggccaataagtgttcgcgcagatcattttccatgtggttgagttctttttcagccacttggcgtttttcgcggccttcttgttgaatcttgagggtttcttgtaaggtttcaacaagatcattttgtgttttctgtaaggtttcgatatcaacgacgccgcgttcattttctttggcggtttcgattgaagacatcttcaacatcgcactatttttcttcaagaggtcattggtcgtttcagacacttgtcgttgtgcagtgaccgcatctttttgacggagcagggtgagggcgatggcaacttggtttttccagagtggaatcgccgtgttaatggaagcctgaatcttttcagctaatgcttggttggtattttgaatcaagcgaatctgtggtgcttgttgcaacgtgatttgccgtgctaattctaaatcataagttcgtttttccaagcggttcttgaattgattgagatcattaacttcttgcacgaccatttgattatcgtcatttttggcgcgttccatggcttctggaatcgtcgttgtttctaattcttgaatcttcaactgaccagcagcaatataaatattgagtgcatcgaagtaggctttattcttcgcatacaacgtttcaagcgtctcattgtcgcgcattaatgcatttttttctttgtccaatttaacggcaatcccatcaatttgggcgccaattttttgatatttcgcagtgatttcatagaccgacttcttaatcttgccaaacatccgcttgaaaacgttgctgtcttcggcgcgtaattcggcaggattggcttcgtttaaacggtacatcaatgacgttaatgcgtcaccaatttcgcctgtttcttggctttggacttggttgagcattgtttgggagaaagcgccgagtttcttttgggcttgagcgccgtaattcaagacggcttgttggtcgttgacgtccagttgttgtgccaattgttcggcctgtgcttgttgttcaggggagagcttattgataattgaggcctctgcctggggggctgcttcctcagtgacaactggcgcactttggtcgaaaggatcttttaataaatcattcattaaatcgtttgttggattgggcgtttcagacattagtcttcctccttgtgatctggggtgatttgttgttgagcgacggagacttctgtgtctaagtcatcgacatcttcggccacgaaatccgcgtagtcttgttgaatctgttgactaagcgcatcaattgccgcagccgatttatctaaaacgagataggtatcggctgtcttgacttcatgatggttaatttcgatgtatttgctagtcagttcattgattgatggtaagtgccggtataaaaagtcgccagcattgtgaagccgctttggatctttcacaatcgcacgaaaaagcgattggctgaccttggttgtatcgtgatttaaatcgattgcccgtaatttaggaagagcttgcatgttggttgcaagtaccttaatttgcgcttcggcttgttgcatcgtttgtctgaaaaagtcaatttcgtcatcactcatgccagcatcttggtagtgtttcagcatttgtggtgaaatatgctgatcttttttatattctggttgtcgtttaagccgtttgaggctgattgtaacgtagatcagccctaataataaaccaaggctgaaccagaggaaattatcccaatcaccataaatatcaaagcatgttgccaaaattgggattgagacaagtgtaatgagcatgcctgtgcaccaaatcgttatttttttaaacataattgtcagctcctgatttaattgatgccttcattctaacaggaattaaggtaaaagagtatccgcctaaggatggatttttaattcggccgtgaacctgaatttagcattgacgatggcggacgattttaaatgcgcgtataatagcgattaaacggtaaaggtggcattagcagatggattatacagaaaaggtcctctcggaagaaacattattcaaaggccagatcattgatcttgccgttcaacaagtggcactgccaaatggacaaaccgcaagtcgcgagattgtctatcatcatggggcggttggcattattccgattacggcggataaccgcatccttttagtgcgacaatggcgcgcccccatgcaacgtgaaacgttagaaattcctgctgggaagattgatccaggtgaaaaggacttagatcaggtcgcactacgtgaattgaatgaagaaacgggtttgacgacgcaaaagctcgtgcacgtgacggatttcttttcatcacccggtttttcaaatgaattaatgactttatactacactgatacactaacgccggtcacgcataagcgctcgctagatgacgatgagttcttgaacgttgaaaagttgacgttagaagaagcacaagcagccgttgcagatgatttaatctgtgatgccaaaacgattatggcgttgtattactggcaattacaagcaaaataggagcggtagaaatgacgaatgaacctaagacgcgcgaagaatatcgacaacaaaaagaggctgaagaagccgcctttaaacagcgcgatcaagagcgcctcaggacagaacgtgaatatgcacgtgaacaacaaaaagaagcccttaaagcggtgactgaagacgaaccagaaacagcaacgcgtcggactaagaaagtcgatccaccagcggttaaacgaatgaagaaacggttgaattgggcgattgggattacctttggcttaattattatcgtttacttgattctttttttcctatagaatggtaaagttaatgtttttttagaatggagagagttagtatgaaaattagtgtcatttgcgccatggaagaagaaattcggacgcttttaacaaagttagaagatgtgcaacaacacacggttgctggcaataccttttataaaggtcaattgtacggtcataaagtgacgttggttgaatcaggaattggtaaagtgcaagctgggatgacgacggcgattttattagccgaagaaaaaccagatgttgtgattaataccggttcagctggtgggattggtgaaggccttcatgtcggcgacgtcgtgatttcaagcgaagtcgcttatcacgatgcagaagcaactgcctttggttacttaccaggtcaattaccacaacaaccccaacgatttgaaagtgatgctaagattgttcaacaaatcgaagcggctgctaaagcggttgacctacaaccacgtgttggtttaattgtcaccggtgatcaatttgttgcgagccaagataaaatcaaggcaatcaaagaaatttaccccgaagcgctctcttgtgaaatggaaggcgctgcaattggtcaagtcgcaacgcaattcaagattccattcgttgtcattcgcgcaatgagcgacgtcggcgacgaagaagccggcgtaacgtttgacgaattcatcgtagaagcaggccaaaaatcagcagcaatgttgcttaacttcttgaagaatattaaataaaatgagtgcgttcaagctcgttaaagaagaagtgcgttcaaaccgggtatattccgagcactagcccaacaaggcgaatgattgctgcaagcaatcgtttgacttgtgtcgctaggcacaggcatatggtttgaaaagcacgttaaataaaagaagtgcgtcatcaacggttagcttctgagcatttgcataacttaacgaattagcgacatagtcgatgatttgataagtgtagcaaagcgcaggaaactgttgatgaaagcacgttaagaaaataagtgtgttcaaactggttatgttctgaggattagcaaaattagacgaataagcggcgaagccgattgtttggctaattaggctaaacgtaggaacatggtttgaaaagcacgttaaaggagtccaacatggaaaaattctgtcaaagttgtggcatgccactgactgcacaaaaccaaggtagtgaacaagatggcaccaagtcaaatcagtattgccaactgtgttacgttgatggtcagtggacagaaccaacaatcacttttgaacagatgcttgaaaaagggattgctgggattcgtgccgaccaaacaaccggtaagatgaaacaatggttcctaattaaaagctatccgatgatgcttaaaaagatgcgtcggtgggcataaaatatcaaaagaaacttatcctaatgggtaagtttctttttttggttaaatggttaaattctgctaaactaacaacaacgttacgaatggaagaggggatgtcaatgacaccagaggtgcagcggtattggcaacaattcacggaacagcaacagttatcacctaatttacaaccagcggagatttattcatttgggaatacagaacaaatggccaatgaattggcacgattggtaataatcggtcaaaaaacggccaccacttctgcgattaagttgtatgaacccgatgagcatgtcccacaagtgggggattataatgttattttagatggacgagaccggccggttgcaattacgaaaacgataatgtgcacgattgttaagtatgatcaagtcgacgctgaacatgcctttttagagggcgagagtgatcgaacgcttgcttattggcgttcagttcacgagccattttttaaagctgaatatgcagaggcagggcaggtgtttacgccgacaattgcctgtttatgtgagcgttttgaagtggtaacggagaggcgtgaattaagatgattcctacacgattgtcagaaggtgatgagattcgggtcatcgcgcctagtaatagtttgcaaagtgttggcggatatgtggctaatcaaccggcgaatgatcgattgagtgcacttggttatcaggtgacgtttgggcagcatgtcttggtaatggaccaattcaattctagtccaattgaagcgcggattgccgatttgcacgctgctttcatagatgacaatgtcaaagcgattttagcggtgactggtggttataacagcaatgaactacttcccgattggacagtcaatcacggtcaatgcgacagagggatagttacaaatcgaaggcgattaatataaaatgcaaaagcggcggatgacacaaaaattatttttgtgtcatccgccgcttttgatatccgcatatttgtgctatcagttatatgtctgcgattaacagtaactacaacacactctctttagagtaatgctaaagttcgttgtagttccggttcttgttcaagttttgcgagtggtaagtcatgggtcacttgatggtcttcattaaagacgaccacccgtttagcgacttgtttgacttgagccaggttgtggcttgcaattaaaatcccttttccggcttgattgagttgttggagcaagtggataatcagcgtttggtaggcggctgataggccgttgaatggttcatcgagcacaattatttcaggattcatcgttagcacactgcccaaagcgacgagttttttttcgccaccggaaagctgataagggacgcgatcagctaagtgttcgatttgtaacaacgcgaggcaatcgtcaacgcgggtttgcacttcatctggggctaagcccatctgttctggaccaaaagcgagttcggcgcgcaccgtttcgttaaataattgaacgtcactattttggaacacaaagccgattgcgcggtggagggcagtcgcctgtgcaggctttttgaggaagcgggcatcgacaagttggtctttaaaataatattggcctgcgctgggctgaatcaaaccgttaattaatttaaacagcgtcgattttccggaaccattaggccccataaacgcgacggcctcgcctacttgaatggttagtgagatgtcgttaaggctgtcggtttgcgtataggcgtagtgaatgtgttgcaaattcagcatctgattacctccgaatgaaacagaataggcaaaatagccctagatcccagctgattaagcgccagtcgtagcgattcactgttagcggcgtccgtcgggtgacttgtccggtgtagccccggagaatcatcgcatcgtataaagcggtaatgtagttgcgggaacttaagtagaggcggccaatcagtgaaccgactaaattttgccgttggtggcttttaccagttgagcgtagccgaattgcccagagggattcttgtaaaaattgggcgagcaagtggctgtatttcagactaatttcgagtgtcaaaatgagcagactggggagtcttaattgacgtaaagcaacaataaaagcgggccaagtgatcgtctcgagaaagaaagcaatatttaataacatgatttcagtccgtacgataaataaaagcgttgtggcgacttggccgagccaaaaattcggtagaattaataaaatcgcaatgatactgatatcaccgacgcgtttaaaaagcggccataaatgctggcttggtaagcggcaaattcgaattaacgtcaataaaccaatcaaccaaattaaaagtagactatgggttaacacgagaatgatgagtgtcaccaataaactaatcagttgaataccaggcgtttgatgggcgattaaaggttgaggttttgtttgattaaagcgccgcagcaaacgatcactaaagcgcaaattttgaattaaaaaacggtcgaattgcgcgaccgttttgggcgtagcttccgttgtttgaagccaagttggtaatttaggattgggttgaataatgattcatcaccagttttccgataagataaaaaacaatgacggctgttaccgctgataagatgtagccaagtgatagtggaacgccagcaactgtgtagtcactaaagagggcattaaagtttaagccatgggccataccacttggtagactgtgacctaggtgatcatgtttgagttgtgcaacgagttcgcttgcgctccattcgccccaagcagtaccactagctaataggccaatcggcgataagatagtcaataggccgatgaaactgtaaagcgcgtgatgtaagcgacggctggtttgtggatcaactgtttgacgtggtgcaacgaacagttcgttaggtgcaacccggcaaatgaattgataaacggcgagggtaaagccggcttcaacccaaccagcgactaataaatgagcgaacaacatggctggaattgcaatgtgtaacggataaggggcatacatgggttggccagctgcgttatgcgcaacgagtggttgcagaccaagttcaataccggccattaatgcagcggcattaatcccgagatatgcgccaactacgactcccactttgggctggtgtgctttttggaatagtcgatagagaccatagccgacaaatggcatgataatggccatgttgaaaatattggcaccgagtgcgagaatcccaccatcaccaaataaaaaggcctgcatgatgagtgcaatcgttaccgctagactagcggcgtacggcccaatgagaatcgctaatagggttgcaccaacagcatgggcggttgtaccgccaggaattggcacgttaaacatcatcatcagaaacgatagtgaagcggaaatccctaacatggggaccgtttcttttttttcggtgacttggtatttaactttcttgagtgccaagccaatgactggaatagcggccgctgcaagcacggcacacgtttggggacttaaataattatctggaatatgcatacataaaaacctccactgatttgttctcgactattaaggctacgcgtctcatagccgttttcaatcacgaatcatgtttacatatgttaacaaatcgctaattggcgatattatcaagcaagtaactgacatctttgattaagaatttatgctcggtggtttcaatcacgccgtcttttttgagttggttgagcatgcgattgacactactgcgcgagctaattccgcagaagccggcaatgtcttcgttagtaacgacgaagtcaatcaggatgccatcgcggcgtttcttaccaaagagatcaattaagctgtataagaaggcacacagcccgccgtttttaccattcattaccattttttgcaagcgataaatattctcggataattttttacgatagtaatttttaacgtaattctgtaactcgggggtggcattcacgtagttccagaaggtcacgcggtcaatctgatagaaagttgcttcctctgtttcaacgcgaacgttaaacggttgatccgtatattttgaaatttcatcccgtaaaagtgaaatgacatccggctgggtaatgtaagagagattgaattcacgaccgtcttgtaaaatgatcgagtttttaatcacgccttttttcagaatataagtataccgttcttccaaaccgtggtacgtcaagtatgtgtgcttctttttggtaatcactgggacgtgacgttcctctaaaaagttaattaaaaattcaatgtctgttaaaaccataatacatctgcctaccctttgtgctgatttattatatctgctaatcattaaataactttaatctaaattatacgtcttgaagactataaagttgttatcatttgttacacctaaaagtaataatgaaatgttgttcataaattataccgcatccttttcagaaaatctgtataactatggacgtagctttaaaaaagcattcaatcagcattgagaagggaagtcctatagtttggtagccattaaattaccttacgatcaaaaaattatcacggctaatattgcagacgcgaattttgccgggaagcttgtttcacaagctgctacgtatcaaaatccaatgagcgaagccgaaacggttgaaaaatcattggacaatcccattgatagccctaagttagaagagttggctaaagggaaaaagaatatcgtgattatcagttctgatcatacacgaccagttccttcacatatcatcacgccgattttactaagacggattcgttctgtagcaccagatgcacggattcggattttagttgcgactgggttccatcgaccatcaacgcacgaagaattggttaacaaatatggtgaagaaatcgttgcaaatgaagaaatcgtcatgcatgtttcaaccgatgacagctcagttgtgaaaatcggtcaattgccatcaggtggcgattgcattatcaataaagtcgctgttgaagctgacttattgatttctgaaggcttcattgaatcccatttcttcgctggtttctcaggcgggcggaagtctgttttaccgggtgtggcttcatacaaaacaattatggccaaccactcaggtgaattcatcaattcccactattcaagaaccgggaatttaatgcataacccagtccacaaagatatggtttatgccgctaaacaagctgggcttgaattcatcttgaacgttgttttagatgaagacaagcacatcattggttcattcgccggtaatttagaaacagcgcacaaaaaaggctgtgacttcgttgaaagtttatcagaagtcgacaagatcgattgtgatatcgccatttcaacaaatggtggctatccacttgatcaaaatatttaccaagccgttaaagggatgactgctgctgaagcgacgaacaaacaaggtggcgtgattatcatggtcgctggtgcacgtgacgggcatggtggtgatgggttctatcacaatattgctgacgttaaggatcctaaagaattcttagaccaagcaatcaatacaccacggcttgaaacggtccctgatcaatggacatcacaaatcttggctcggattctggtccaacatcatgtgattttcgtgtcagatttggttgatccacaattaattacagacatgcatatggaattggcaaccagtttagatgcagcgttagaacgggcctacgagattgaaggggcagatgccaaagtgacagtgatccctgatggtttaggggttattgtgaaataacaatagaaagaatgagtagtttggacacaacaaatgagctacaacagcttttagaagctgttgcaaaccaaaaagtcagtgtgacagaagcaacaaagcaactggcacatgcgcagaccattgatgatttaggctttgccaaggttgacttaagtcggcaaaagcgcaatggctatccggaagtgatttatggcgccggtaaaacggcggaccaaatcattggcatcattggttcgttaaaacgacatgccgaaaatattttatgtacgcgagtttccccagaaaagtacgctgcgattcaagaagcggaaccgacagcaatgtactatgaaatggcgcaatgtgtagtgctgatggttgacccactaccaaccacggatcactatatcgccgttgtcacagcggggacttccgacatggcagtggccgaagaagcggcggtcactgcagaagtatacggtaatcaagttaaacgaatctatgatgttggtgtggcgggcattcatcgcttgtttgaacatttggatgaaattcgccaagcccaagttgtcatcgtggtcgccggtatggaaggggccttagccagtgtggttggtgggttgatcgaaaaacctttgattgccgtgccaaccagtattggctatggcactaactttggtggactaacagcgctgatgaccatgctcaatagttgtgcgtccgggattaccgtcgtcaatgtcgataacggctttggtgcgggctactcagcaagtatgatcaatcatttaagtgacacggaggatgacaaatgagaactctttatttagacgcattttcaggaattagtggggacatgttcatcggcgctttgctcgatttaggggttgatttcaaacagtttgaaacagaattagctaagttgaatgtccctggctaccacctacatgcagaacggattgctaaaagtagtatttatggcaccgattttgacgtccatttgccagaagccatgcacaaggatgaaggttttattgaaacaacaccggcacagcatcaacatccgcatacacacgcaactggccatgcacacacgcatcaacacgcaaatggacacacgcacagccatggtgatgacgtccgacatttaaaagacattgaagccatcatcgatcacagtgatttaagcgattatgttaaaacgaacgccaaacaagtttttacagaaattgcgcaatcagaagcggtcgttcatgacctaccatcaagtgatgttcattttcatgaagttggggcgcttgattcaatcgtcgatattgttggagcgtttgtcgccctcgaattattggcagttaatcaagtctattcatccgaattaacggatgggagtggctttatcaaagtcgcgcatggcatgatgcccgtaccagtccccgctgtgatgcaaatgcgcgtcggtagtgcgattccaattaaacaaaacccagacttgcagaccgaattgatcacgccaactgggatggggattgtcaaaacgattgtcgaccaattctgtccaatcccagacgatcaaacgatcattaaagtcggctatggttttggtaatcgggaaacaccgcaactcaatgcattacgcgtgatgttgtgcgaaaaaaaaaactaagccaacaggttgttaaaaccgataccgatcagattttagtgttggaggccaacattgatgaccagtcagcagaaagtttagcgccggttttggatttattgatggacaatggggcgctcgatgcctttttcagtccaattcaaatgaagaaaaatcggcccgcaattaagctaacggtcatgattcatccagccgatcaacaagccatgacttatctgatcttaaaacacacagcaactgttggtgtgcgttaccagacgatggggcgcaccattatgccacgtcattttatcactgtagccacgcgcttcggcgatattcgggtcaaaatcgtgaactatgacgatctcgaaaaatatagtccagagttcgacgattgtctagctgccgccaaggcgcatgacgtggcacttaatcaagtttatcttgctgtttatcagagtatgcccgagtcgggtctatcctgatgtaacgcgttaaagctatcaaaatttagatattaaatcgttattatttggaggaatttattcatgattcatcagttattagcagaattcatgggcacagcgctcatgatcattttcggggttggggttcacagtgatgaagtcctcaaaggttcaaagtatcgtggctcaggtcatttatttgccattacaacatgggggtttgggattacagtttcattattcattttcggagatgtttcaattaacccagccatggtgttagcacaatgtatcttaggcaacgtttcatgggcaatgtttatcccttactcagttgctgaagtcttgggcggggttgtcggtgcagttatcgtctatatcatgtacgctgatgaatttaaagcatcagaaggcaatgtcgatcctgttgcggttcgtaacatcttctcaacagcacctggtatccggaatttaccacggaacttcttcgttgaatttttcgcaacatttgttttcatttcatcaattatcgccattacacaaatcaagacacctgggattgcaccaatcgcagttgggttacttgtttgggcaattgggatggggatgggcggtcctaccggattcgcaatgaaccttgcgcgtgatatgggtcctagaattgctcacgcgcttttaccaattaaaaataaagccaactcagattggcaatacgggattatcgtgcccggaattgcaccatttgttggtggtctatgtgccgcactctttatgcggagtttctttggcatctaatttaatcggaggaatcaaccatgcgtgaacaaattaaacaaacgcaaaacatgatggtcgacttattcgaagtcgctgctcatgcctcacaaccggggacaatctcaaccagtttaattgaagcgcaacaagcgcttttaacagcagaacaactttatggtagccttgatgacgcgcaacaaaccgctagtcaatcaactttcaaaaactttgttgatagtgccgcgcatttaaacttgatgatcgtcaagagtttagataacaacgatttggtgtatgccgatcggattcaaaatgaattaacagctttaaaacaattaatctaatgatatagaaagaagtctttaacaatgaatacattatctgaaaaaaaagcaatgttaactgtcagtttacaacaaatggaaaaagtgattgttgccttttctggtgggattgatagcacattagttttaaaaatggctttagaaacactcggcaaagaaaacgtcttagcagtcgttgctaactcagaattattcacagacgaagaatttaacaaagccatcgacttggcacatgatatgggcgcgaatgtcgaaacaacaacattgaactacttatctgacgaacacattgccaacaacacaccagaaacatggtattacagcaagaagatgttctatacacaattgaaccaaattgctgctgaaaaaggctttgaccacgttttagatgggatgatcatggatgataacagcgacttccgtccaggtttacgggcccgtgacgaagctggcgcagaaagtgtccttcaaacagctggtttttataagattgatgtccgtcaattagcaaaggcattaaacttaaataactggaataaagtagcgagctgttcagtttcttcacgctttccatataacacagccttaactgaagccaaaattgctcaagtgatgcaatctgaaaaattcttgcgtgatttaggttttgcaacggttcgtgttcgttaccacgaatcaatcgcccgggttgaagtcccagaagcacaaattgctgacttcttaacccacagcgaacaaatcaaccaagcattacaacaagctggttttgaatttgtaacggttgatttagctggtttcaagagtggccggatgaatgaatcattaacagcagatcaaaaagcagctttaatgactgcttaatctgagattaagtgttttaaaggctgggacaaggtatctttgtcccagccttttttggtagcgaaaagtgtttatccgtgctttaaaagcgaactatgttaaactattatagatactttttaaaatgaggcgaaaaattgtgaaacatatttatttagataacgcggcaacgacacccatggccccagaggtcattgcgacgatgaccgaacagatgcaggccgatttcgggaatgcatcgagcacccattattttgggcgccaagcccacacggtgttggataccagccgccatactttggcacagagcattcatgcgaaagataacgagcttatcttaacgagtggggcaaccgaaagtaataacacggcaatccttcagacagccagactgcgtgctaaagaaggcaagcggattattacaacggcaattgaacatcattccgttttaaaaccgatggcctatttagaaacgcaagggtttgatgtgatttacttacccgtcaacgaacaaggggtgattgatctcgcagatttgaaggcggctttaacgcccgaaacgattctagtatcgattatgatgggcaataacgaagtcggcagtcatatgccaattcacgaaattggtgaacttgtccgcgactcaaacgcctggttccacacagatgctacgcaaacgtatggcttattagatatcgatgtgcaagctgacaatatcgatttactggcagtttcagcccacaagatcaatggacctaagcaaatcggctttctctatgtcaacgacgcgattcatttaccatcatttgtcctaggtggtgaacaagaaaagaagcgccgcgcagggactgaaaatgtgcccgctgtagctggttttgcgaaagcagttgaattattggccccagcggttaaagcagacctacaagcacggtatgctggattcaaacagcaattactagctgatttaaaagccaacgacattgattttgcgctgaacgcagaaggagctgatcaagtcgggcatgttgtgaacctctggattaaaggtgtttcaacctatgtcttgcagatgaatcttgatttagcaggctttgcaatttcaggtggttcggcatgtactgctggcgatttggaaccctcacacgtgttgatcgcgatgtatggtgaggatagcccgcgcgttgccgaaagcatccggattagttttggtcacgaaacatcgagcgaagacgtcgctgcttttgccgaagcgctcacgaagattgtgaaacgcaatttagcaaagcaagccgctaaggggtaggcagcgtttacgtgcttgtgctaaaatagacttattcagtgtatggaggttaggcagatggctttattaaaaacaacagcaacggttttggggagtacggtgcaatatcgactcaatcccgccgttaaaaaatacacattaagagatgttggctttgtgcccacaaacaatggtaacttccagatggaacggccattagatcctaattcaccatttaacagtgcgattaagttgaagatgacaattggtaaagagttacagacgttgaagatgtctgtcacctctccagatggcttacatccagtcgatattttcaagagtgaaaagaatgctgaaaacgtcgaacaatttaattttattattgctaacttagtggcacgtgaagtgttaattaaagaaggctaaataacgttttaagagcggtttaccaggagtttgataggtaaactgcttttttacgtttaacttatgaaaagtgagtgttttagtttgaaatattaaccaagattgctataatggtaagtactggaattcacgaccttcaaatcgtagaaaactagaatctatttgaaatgatggtgatattgtggttgaccacagtaatacacgagtcgtcgttggtatgagcggcggggtggattcatctgtcacagcattgttgttaaagcaacaaggatacgatgtgattggtgttttcatgaaaaattgggacgatacagatgaaaatggtgtctgtaccgcaacggaagattatgaggatgttgccaaggttgcttctaaaattggcattccttattattccgtcaacttcgaaaaagaatattgggaccgcgtgttcgaatatttcttagacgaatacaaacacggcagaacgcctaatccagacgtcatgtgtaacaaagaagtgaaattcaaggctttcttagattacgcaatggaattagacgctgacttcatcgcaatgggccactatgctcagattgaacgcgatgataacggcatcgcgcacatgttgcgtggcggtgatagcaataaagatcaaacttatttcttgagcgctctttctcaagatcaattacaaaaatcaatgttcccaatcggtcacatgcaaaaagcagaagtgcgtcggttagctgaagaggctggcttagcaactgctaagaagaaggactcaaccgggatttgtttcatcggtgaacggaacttcaagcaattcttaggcgaatacttaccagcacaacccggtaagatgatgacggtcgacggtcttgaaaaaggcacccatgacggtctaatgtactacacgattggtcaacgctccggtcttggaatcggtggcggtggcgaatccaatgatccatggttcgttgttggtaaagatttagacaaaaacattttatatgttggtcaaggctaccataatgaattactctatgctgatcaattagatgcaagtaatatttcttggatcacaccagttgatcatgggacagatttccacgtgacggctaagttccgttaccgtcaacaagacgtcggcgtaaccgtccacatgacatctgacacaactgcaacggttgtctttgatgatccagtgcgtgcgattactcctggtcaagcggttgtcttttatgacggcgcagaatgtttaggtggcggcacgattgacgtggcttataaggctgcgaacgatgatgctgacatgaaagtattacaatatatctaatttaatcgttaaaagtgctgatgaatttatatttatcagcactttttttgtgggtttgttcaataagtggtcaacgaccttttttagaataaaatcacaatataacgtttaaaacataagtggttattcgttttagattgtgaaattaatttaatagctggaggcaattgacttttcgaaactaagtagcgtacaatatagttacatgctggttgcgtaatatttcacaaattctcaacgattaaccgtcgttttttggatatttctaggaggtaacatgatgaaagtagcagttattggttgtacacacgcagggacatttgcaacacaagcaacattggcagaacatcctgattgggatgtaacggtttatgaaacacacgataatttatcattcttatcatgcgggattgccctttgggtgggcggccatgtagccgatcctcagaaaatgttctattcaaatccagaaatgttagcgcaagcaggcgctcacatgaagatgcaacacactgttttagaagctgacttagatcaaaaaatattacgcgttaagaacttagtaacggaagaagaaacaaccgaaaaattcgataaaatcatcatcacaacgggctcatcacctgtgattccaccaattgaaggcatcgacaatccgaacgttaagctctgcaaaaactgggcgcatgccaatgaattgaagaagagcgccccagatgtgaagagtgttatcgtgattggttcaggttacatcggtgccgaattagcagaagcctatgcaacaactgataagcaagtaacattaatcgatgcattaccacacgcactcggcaagaatttcgaccctaatatctcagaaatcgtggaacaagattaccgtgaccacggtgtaaccctcgcgcttagcgaaaaagtggtcagtttctcagggacggatcaagtcactgttaaaactgataagaacgaatacacagccgacattgcaattttatgtgttggcttccgcccaaatactggccttttcaaagggcaagttgatatgttaggtaacggtgcgattttgacggatgaatacatgcaaacgtctgttaaggatgtttatgcagccggcgattcagcagctgttcattacaatccaacgcaaaaagcagattacattccattggcaaccaacgctgttcgccaaggccttttaatcggccgcaacatcgaaacaccaactgaaaagtacatgggcacgcaagcaacttctgccgttgaattatttggtcgcacctattcagggagtggcctaacagttgaaggcgcgaaagtgcgtgggattgaagtcgctacaacaacgttagaacaagattaccgccctgatttcatgccatcaacgacaccggttttgatgaacttaatgtgggatcctaagacgcgtcaagtattgggtggttcattcacaagtatgtatgatattgctcaagcagcgaacgtcatttcaatggccattcaaacgaagatgacgattgatcaattagcaatggttgacatgttcttccaaccaaactacgatcaaccagtcaactacgtcaacgcaattgcaatgcaagctgtcgcagaaagtaaataaaagagtgtgtaagtaagcgttcatattttgaggattaactgaatttggcaaatagggttaaccgcagaaatatgcctactgaaacacgtttagagcaactaatagatgaaaccgctaggataaaaagtatttttatcctagcggtttttttgatggcgttttacaggaaaaatgcttgctttattagtcgattgacttgaatttagggcgtaactctttcataatgaaaagtaagttattttaaggagagaacgcatgacaaccttatattttatccgccacggtaagactgaatggaatttggagggccgctatcaaggtgcacgcggtgattcaccattattagacagtagttacgttgaaattgaagaattagccacatttttaaagcccattcattttgatcatttatatacgagtccgttaaaacgcacacaggtaacgtctgcggcgctaaaacgagacttagggcaggattttccgattacggttgttgatgcactccacgaatttaatctcggtctaatggaaggaatgcgctttacggaagtcgaaaaacaatatccgacaatcgtgaaagcctttcgtgaagcaccagcggagtatgatccaactgaaattaaaggggaaacctttgaacaagtgattgaacggacgacgcaggcaattgacgcaattgtgaaggccgctaaaccggctgatcatattattattgtcagccatggggcagcgatggtggcgatgatgcagtccttactcaagacgccattggctcaggtccgcaaagacggcggtgtgacaaattcatctgtgaccacgatgacaactgacgatcaaggagcatctttcaaactaattaagtggaatgatacacacttcctcagcaagcaattatccgcaacagatacgatataggagatgatcacgtgcaagcaattctagcaaaatgggccgctggcgaccacgaagccgctgttaaagatctcgtacaatatttacaagatcactcagaagacattgaagcttacgttacccttgcgacatttttaacgacgcttaaagattttgaacaagctgaagcacttttgcaaaaagcgttgacgcaatttcctaatgaagctgcattgacttacgcattaggaacactctattatcaagcggaagcttatcaacaagcggtgcccttgttcatgcagttggtgcaagactcacaatcaacagatgcgcagtatatgcttgcgcagacatatcatcaactcgaacagaatccacgggcattggcgttcgcgttgaccgttcaagaacaagaaccagaccaactagacgccaatcttttagtgggcgatattttaacgagcttgggtgattttgaccaagcgcagacctaccttaaaaaggcattgaccattgcacctcaaaatggtgaagtattatttaagtatggcttgacgcaactggtcttaggcgctgatagtgagccttatttcgaacaagccaagcactatgcaccggattattttaaaaagaataaacaacagttaattgatattgaaggcttcatgcaggctaaagagcaaaaagaataagggatggcgattgtggatatagcaaaaacagacgaaaccaaaccaacagtcaccggaaccgtccagagtattttctatgagagcccggataatttttttaaaattctactcgttaaagtagcacataagacgattgactggcacgaaacagaaattgtggtgaccgggagttttggcgacattaaagaagatgaacgatataccttctatggcaaagtggtcactcatcctaaatatggcaaacagtttcaagccgataattaccaagtggaccaaccaacgactaaggccggcttagtcgcttatttgtctggcgaaaaattcacaggcattgggcagaaaacggccgaaaaaatcgtggatactcttggaattgacgcgattgataaaatattagaggatccgacggcgttagaaccattggggctaaatgcgaagaaacaagcacaactcgttgaaacgctgacgattaataatgggatggaacagattattattggcttaaacaactatggttttgggagctcgatggcctataacatctatcagacctaccatgaagatacgctgaagattatccaagaaaatccgtaccaactcgtggctgacattgctgggattggctttaaacgtgcagataatttagcggagaccctcgggtttgccgctgattcagccgtgcgggtgcaaggggctttaatgcaagcgttaaatgagttgaccaatcaagctggggatacctatacccaggccaagccgttattggcagctagtattgagttgatggaaaaagcacgcaatgttgccattgatccgaacttggtggctgaacaactgatggcacttgcacatgatgggaaagtcgttggtgatgagaatcggatttatccgaatgggttatttaatgcggagtggcaaattgcgaaccatttaatgcgaattgaaaatgaacgcgatcaacttagctatcctaaacatgatctagatcaagaaattcgccacctcgaaaaacggtttaagatgacatacgatgacgtacaacaagaggcgattaaacttgcgatgactcaccgggcgttcttattaaccggaggacctggtactgggaaaacgacgattattaacggaatcgtgacgttatacgctgaattaaacgggctgtcattagatattaatgagtacaaagacacgccgtttccgattttattggccgctccaacaggtcgggccgcaaaacgaatgagtgaaacaacgggtttgcctgctagtacaattcatcgcttactcggaatcactggccgcgaaaataatccagatgtttccggtaacaaagaattggaaggcggcctattgattattgatgaaatgtcgatggtcgatacttacttgtttcgctcattactacgggcggtgcccagtcatatgcaggttgtattggttggggataaggatcaattaccatccgtcggggcagggcaagttttctttgatttattgcagagtaaggttattccagcggttgaattacaacgtatttatcggcaagatgaccagtcaacgattattccgttggcgcatgaaattaatcaaggccaactgccagcggatttgttgaagccgcaaaaagaccgcagtttcattcaatgtaatccgtatcaaattgaatcggtgattgaacaagtcgttactaaggccaaagcgcgtggttttgaaaccaaggacattcaagtgctagcgccgatgtacaaaggagcagccggaattgatcagttaaacccgatgattcaaaatatcatgaatccaaagctagatgaccgcaaaaaacaagttagcattggtaacgttcactaccgcattggcgataaagtactccatctggtcaatagtccggaacaaaatgtgtttaatggtgaaatcgggcagattacggggattacctatgctaaaaagagtgcggacaaggttgacgagatcaccattgcttttgatagtgcagaagtgacctataagcggagtgagtggcacaagattacattggcttactgtacgtcgattcataaggcgcaaggttctgaatttgaaatggtgattctaccattggtcaatcaataccaacgaatgctcaagcgaaacttactgtacacagcagtcacgcgggctaaatcattgttgattctgattggtgaaccgagtgctttccaaaaagcagctcaggaactttcggccaatcggcaaacgacgttaaaagaacggattcaaagtgtctttaacggtgaacaactcagcaccgccattaagacggccagtgtggggcagacagaagccaaaacaattgttgaccagccggcaccaccaagtgcgccagaaacggctgttgatgaacaactgaacttagtgccagaagacgacgacgcaatacaagaaacgccaatcagttatgtcttaacaccgactgttctaacgcaacagcaagtggatccaatgattgggatgaccggggtgacaccgtacgattttatgccgaaatcaaaatagtgtataatagggaaaacaactaacgaaaaatgaggcgaaacaatggttgaccagcgatctaatttagagattagacccgtgacaattgaacatttagaacaatttaatgacttattacggtatgtttttcaagtcaccgatcaggaagtttctgatagtggctacgaagagggcgaattagaacgcgccaaacgtcccgtattagaaaaatctgacgtaatcggatggtttaatggggacgaactgatttcacaattagccatctatcattgccgcgtgaacattcatggccaggtatttaacatgggtggtttgactggtgtcgggacttacccggaatatgccggtcatggtttgatgcatgacttggttaaagtcggcttgaacaagatgcgtgagaataagcagtggatatcgtatttatatccatacagcattccgttttatcgtaagaaagggtgggagatcatgtctgatcacctaacttatgatattcgtgatagccaattacctaagcaacggccggtaaatgggcacgttgaacgccttgatattgacgatgaagacgtgattaaaacgtatcaacggtttgcactaaaaaatcacggtgcaatgattcgtaacgaactgaactgggatgaatattggcgttgggaaaatgaagaagaacggattgctggtgtttattatgatgaaaatgaacaacccaccggctatgttttatactggattgccaacgaagtcttccatattaaagaaatgatttatcttaatcaagaagcccggattggtctgtggaacttcattggcgcgcattattcaatgattgaacatgtcaagggtaatcaatatcaggatgaaccgatttcattcttattagaagatggtgatattgaccagacgattaagccatattttatggcgcggattgttgatgtgcgtgaattcttgttggcttatccgtttgaaacggacgggcaagcattccacattgaattgaccgatccattagctgaatggaataacggtacgtttggcgtttattgggatgaacaaggaaaagtgcaggtcacaagtcgcccagtcggtgaacgaattcaatgcgacatccagacactaacaacaatgctgatgagctatcgacgcccatcatacttggcaaagattgaaagactccaagccaaccgacaagcactaaaaaatctcgagaatattattccaatggaccaaccatacttctcggattacttctaaagaaatgagtgcattcaagtttggccaacttttgagcactagcctaacaatgcgaatgattgctgaaagcaatcggttgacttgtgttgctaggcacaggaacatgatttgaagagcacgttaaaaggcgctgcccccaacttggaggcagcgccttttatttatgcttgcttctttagccaaaatgcctggcttttaagactgtagtgaatatcaaatgtccggctaccaagttcttcaccgtccatttgcccgaattctaatgtttttgtttgaatcgctaagttggttccttcaaagtgatgcaccgcttgatagcgtgtgtgccgaccaaacaacatcatcacaaaaagatagcaaaagaaaaagggattcaatttttcaatcacaattaaatcaagttgatggttgtcgaccgttgcgctaggcatgatggggacccctccgccaaagtagggatggttagtggtggtcactaaaaagccacgtttaaaataatgattttggtgatcagccgtgacggtgacttcaaatgcatcttggtgcataaaaactttaaccaatgagctgatgtaagctaatgagcctaagtgcaatcgatttaaaagtcgtttatgatttgaatgattggtggtgctgaccacgttggcatcaaaaccaatccccacattgttaacgaagtagccatggtcgttcttcgttgtgtcatgataataacctaaatcgatggcagttggcattgtggccgacaagatttgttcgagtgcggtcaatggatcacgactaatcccgacaccacgggcgaagtcattacccgatccacaaggaatgtaagcaatcggaatatcgccgcgctgagcattctggagaccattaatggcttgattgagcgtgccgtctccaccaataattaataaaatttgatccgtgtacttaaactttgcaaattggaaggccaattgggtcgtgtgacctgcgtagtgggagagttgaaggtcatagtgaatttgtttttgttttaattgagtttcaattttaggccagatactcgctgcctgaccggtaccggcaacttggtttaaaatgatgtaaaaatggggattggagggcatggacaagccgcctttcagaaaaagtaatctgttgtatattatagcggtttttaccaaatgttgacaataaaaacttgcattaaacaataaaaaaagcgccaggtcatatattgacctggcgcaaaacttattattctgtactttgaatgatcattggtaaaatcattgggcggcgttctgttttttcaaacaagaagtcttgtaagccatcaatgattgcttcgcggacttggttttcagtgaccttgtcgttagcgttaaacgtattgacgatcattcggaaaactcggcgttgggcttcgctaatcaattcacctgattcacgcatgtagacgaaaccacgggagaggatatctggaccagcgagaatgttcttttcaccaagattgatagttgccacaacaacaaccaaaccttcttctgagagcattttacgatcgcggagcacgacattgccaatatcgccaattccgttgccatcaacgtaaacgtcttcggcgctaaagtgaccagcaacccgtgctgagtcagaagtgagtgctaagacgtcaccgttttcaaggatgaagcagttatcaggttccacaccacattgttgagcgagttccgtatggattttttgcatccggtattcaccatggcaaggcatgaagtacttcggtttgattaaccggagcattaatttttgttcttcttgaccaccgtgacctgacgtatgaatgttattcactttaccgtgaataacttcagcaccagcttctgaaagcttattaatcacgtggttaacgctcattgtattcccaggaattggattgcttgagaaaacaacggtgtcgccaggttgaattgaaatttgacggtgagtcccattggcgatccggcttagagcagccattggttcaccttgagatcctgtacatagaatcatcactttgtcggcaggcaacgaatttaattcattggcatcaactaaagcttcatcgggaatatttaaataaccgagttcacgaccgttgacaaccgctgcttccatactgcgaccaaagacggcaattttacgaccgttagcaatcgcagcatcagtggcttgtgagacccgtgaaatattagaagcaaacgttgcgaaaataatgcgaccttcaatgcgttccacaatatggcggattgaagtgccgacgaaacgttctgactttgtaaagtttggtacttcggcattggtactatcagacattaaacataaaacgccttcttcacctaaacgtgccattttttgaagattaggggaaggttgattaccaaccggggtcaagtcaaacttgaaatccccagtttcaacgattaccccttgaggtgtatgaatcgcaacccctaaagtatcaggaattgaatgggtagtccggaagaaatcaacacttgttttgcggaatttaaggacggtatcttcgtttagttcgtgtaattctgttgaccgcaaaaggccgtgttcttctaacttaccgcgaatcaaggcaagtgccaatggaccagcgtagacgggtacattagggacttgttgcaagaagtaaggtaaaccaccaatgtgatcttcatgcccatgggtaatgacgagggctttgatcttttgttggttcttttgaaggtattgatagtctgaaataacataatcgatccctaagagttcatcttcggggaatttaatgccggcatcaatcacaataatttcgtcttggaattgaacaccatacatatttttaccgatttcaccaagtccccctacggcgaaaacggcggtttcgttattcttaatatcgagtttcatttaattaaaactccgttaatttaaaatcttctgattcttgttcaaaagcaaggtgcttaccagataattcttgtacaaattcaatattgtagggagtattgtcttcaacaagttggcgtgcttcaacggcactgtctgcttctaaatagatcgatttagttgcctcgcgtagagggctttgggttttgtctgcttggaaaagtactttataaatcaattgtaaaactcctttattattcatcatagttttaaacgaaagattaaccgtccaggggttgattactcaacatttaagaatattttagcatatcttttcggtaaagtatacattgagcgacgtgctctaaatagcgtgtttgcctcgattcggttataattatcatattagtgagcaatagaagtgggggattgttatgttaatttggttgtcagtcgttatcattgtcgcgttagcgctttttttaacctggttgattaaacggttacgccgacaaagagcgacgcggattttacaacacagtagtcaagaaattgcggatgaaattgcaacggtggcttatcaaaaaatgcaagcgagtcagccggatttttatgcaccgcaagccaaactggtttcgaacctgcccactgaaatttggggcaataatgtgatggtcttcgagtaccaagtgcccatccgacaaacatcgtctgcactaaaggatgtggcagccgcaattgaggaacaactcaatgaagtggcttacgaacggcggattgcctccgtcagtccgcgttatccggctttgctagtcactgatgtgtggtttttggaagaacaattgcattttgacgttgcttttattgtcaatcgcgaaacaatcgagtatgttaaagatatggcacaggtagaagattaaatttgaagtctagaaggagtttgcaccgatgaaattaatgtggcgctatacgatccgatataagaaattactattttggaactttatttgcgtatttggatttattctaatcgaattgggattaccaacgttattaggacaaattattgataaaggaattaatcaacatacctttggtcctgtgtggcaatttgggttattgatggttggaatctgtttaatcggactaattggcttaattggcttggcttatactggtagcaaattaaccaccaatatcgtccgtgacattcgtaacgatatttttaaacaaaccatgcagttttcccatagtgagtatggcgaatttggtgtgtcttctttgattactcggaccactaatgatgctttccaggtgatgcaatttatgacccaagtgttgcggacagggtttatgaccccgatgatgatcgtcgcgagtgctttcatgattgtacggacaagtcaatcgctctcatggattgtatttgcggcaattccaatcctgctaacgggggttgtcttgattggtcgcgtttctgaaccgatgtcgacggaacaacaaaaaaatctggatgcgattaatctgaatctgcgtgagaacttgactgggattcgtgttgtccgtgcttttgtgcgggaacaattccagaaattacgctttagaaaagtgaatgatgactacagtcatagttctatccggctgtttacgttggtggctttagcacaaccgggcttttcgttcatctttaatatcgtattcgttctaatcatttggcaaggggctgttcagattgatggtggtcacttagcggttgggacgttgattgcgtttattgaatatattttccacgtactgttttcatttatgttatttgccagtgtcttcatgatgtatccacgggccgctgtttcagcagaacgaattgaaaaaattctgaatgcgccaattaatattaccgaaaaagaagacggggtaacaacaaccgacacacaaggtgaattggtgtttgataatgtctcctttgcttatccaggtccgactgaaagtccagtcgttcgggatgtcacgttccaagcgcatccgggtgaaacggttgcctttattgggagtaccgggagtggtaagtcaacgttgattcaattgattccacgcttttttgacgtaacacgtggatcgattaagcttgacggtcatgatgtgcgcgactatcaacttaaggcgttgcgccaaaagatcggttttattccacaaaaagcggtgttatttaccggaacaatcgcggaaaacttgcgttatggtaatccgaatgcgactgatgaagaattatggacagctttgaaaattgcacaatcagatacctttgtcgctgaaaaaccagacggcttacaaacttatttagccgaaggtgggagcaatttatctggtggtcaaaagcaacgtttggcgattgccagagcgattgtccgccgccccgcgctttatatctttgatgatagtttttcagcattggattataaaacggatgcggcgttacgaggtgcattgaagtcaatcaccaaagaggcaacagtgctgattgtggcacaacgagttgggactatcatgaatgctgatcggattgtcgtcttaaacgaaggtcaagtggttggtattgggactcaccgcgacttattaaaagataacgagatttatcgtgcgattgcggcatcacagttatcacaggaggaactcaatgaagaatattagagaacttaaacggctaatgcgctacattgggccgtatcaagtgacattttggcttgcgattaccgcaactgttatttcggtgctcgctaatgcactgtggccagtgatcatgggactagccattactgaaatcagtcggagtttagcacaacacgttgcgattaattttagttatatcgcgaaggtgattgcgatgattttgagctttgcgttgctatatcaagtgacgatgtttttaggctcgttttggatgacgcgggctgttcaacgggcgatgcgtgatttacggcgcgacattgatttgcaaatcaatgcgctacccgttcgtttttttgattcacaacaacaagggaatatcttgtcacgggtaaccaacgatgtggacgcgattacgaacgctttacaacagagtttaattcaagttgtgacatcgatcttagggatcatcacggccgtgatcatgatgattacgattaatatttggatggcgctcttatcattaataatgattccagcatcgttattgatttcaagacgggtcattcagaaatcgcagccgtactttagaggccaacaagacacgttgggcgaaatgaacggctttgtacaggaaaattatggcggcttcagtgtcttgaaactttacggacaagaagaacgcgcaattgctgcttttgcagaaattacggatcggttaactgactatggctttaaggcagtctttgtttctggcttgatgatgccgttagttggtttaacgacaaacatgacgtatgccgggatggcaacgttaggtggttattatgtcttgcacggtgtgatttcagttggtaatttacaagccttcattcaatatatttggcaagtgaaccaaccaatctcacagattacacagttgtctggtgtgattcaatcagctgctgctgcaactggtcgtgtatttgaaatcttagatgagccagttgaagcaaccgataatgaaacagcatcgttgccagcaatcgttcaaggtaaagttgaatttgatgatgtcagtttcagctataacccagacaaaccattgattcgccatttgagctttactgctaacccaggtgataaagtggcgattgtcgggccaaccggtgctgggaagacaacgatgattaacttgttgatgcgtttttatgatgtgacatctggaacgattcggattgatggggttgacacgaagcaattaagcaagcaacaagtccgttcccaatttgggatggtacttcaagatgcttggttatatcatgcttcaatcaccgataatattcgtttcgggaaactcgatgcgacagagtatgaagtcgttgatgcggctaaaaccgctaatgtcgatcattttatccatacgttgccaaacggctatcaaatgacgattgatgaagaagcaagcaacgtttcgcttgggcaaaaacaactattgacgattgcccgagccgtgattgcggatcctaagattttaatcttggacgaagcaactagttcggtggatacccgattagaaggtttattgcaaaaagccatggaaaaagtcatgcaagggcgaacgagtttcgtcattgcccatcgactctcaacgattcgcgacgcggatttgattttagtgatggaccatggtcaaattgttgaacaagggacgcacgattcgctattagctgccggcggtgtgtacgctaatttatataacagtcaatttgccgatacgcctgaagcggcggaagcataaaaaaagcatgatcgaaatcttctaatgagatttcaatcacgcttttttatgtgcttctcgagtagcctttaccgttaagcctcaaagcctgaccaactcgaatcagcacttcttctttaacgtgcgcttgggtgcaacaactcccgtttaatctaaaattggcagttatcccacaattcgggataactgccatttctgtattaatgctcagttgctaagcacaaccaatcgcacttctattcaataataatcatgtcatctggtgctgcgaatgggtcttgcttgttgatgtgatcgaagaacaagatgccatttagatgatcgatttcgtgttggcacacaatagctgggtagttttttaagcgaatcttgtggctttcaccgtctaaatcttggtaacgtagtgtaatacggtcagggcggggcacaaagccgggcacttcgcggtcaactgataagcaaccttcaccttcagcaagtgctgcgttttgaacagagtggctgataattttagggttgataatcacatctttgaagatgggttcgtctggtccagggaccaagacagcagacatttgttttgaaacatctacttggggtgcagctaaaccgacgccagcgcgcaagtggtacttttcagcaagttcaggatcctggctattttctaaaaatgccatcatgtcagcagcaagttgccgatcttcatctgatagtggaaaagtaacaggttcagctatttttctaagtgttgggttaccctcgcggataatatctttcattaatatcacagttaagacctccgattaattcgtcattcattattctagcacaattcaagttaaaacggaatgaattgcttgacctgctaaagtgaaacgggtagtataagagtatagatatattgcttttccgttaggtgaggctcctatatgaacaaacgctgctactcagaaacatcgagagatgccaattgagtcaactgaaactgccaatgaaggctttttctaacgtagctgaacatggtttctacgtcatatagtgctaaaactgaacgattgggaacgccatgataaatggatgacgctcaattgttgtgcgtctttttttgtcggataaagcggtatgactaaatttaaagtagagaaagtctggtgagtaaaatgatgaaaacagctgaaggacctgtaagtagtagcgatggtgatcattcgaggtggtctgtcattttactgccagcattaggctagcggtttacgacgacttcctcaaaagggaaggagtgtcgaacgcgatgcacaagaaattaaaaaaagacgttaacatcactggcattaaaagcagtgggatgttaatgcgtttattggcaactcggccaagtggcttaacaactgtcgaagctgctaaaagagaagcagtattagaaaattcacaagcacgggttagcgttatgcgtgatggttttttacgcttaatcggtgcagatcaaattgtgcccggtgatattttagtattggctgctagcgaaaagacacccgttacaatcgcaacagttaacaaagatgttaacgttattgaagcgggcgaagtagtgactgaaatggtgcacggcgttgtgctagatgcaacgattggtgctaaagcacaaacacctaaagttagagtgggaagcacttttatgatggcggtagctgcattggtttcgttttgtgcagtattaatggttaatcaattcgctttcatgggcttggcaacgttggttgtcggggcaatcctgctaacaatgattaagttagtcaaccttggtcaaattaaggttgcgattgatttaaatgatttgcgggtaagtgaacggtgcgtgcaagtcagtcaacaaattaaaccagtagtcagagtgtttcaagagctcttagtgcatgctggcaacgctgagataccccaaccggtcttggcatagaactaccccaacttaaatttaacgatgagtctgctacggcggactctttttttgtgcctattatttgctattatataacagaaaacgaaattaaattataacagatatagaacagacgtgaaaattagctaactagtgattagattcacatgtaataaaaactaatgaaagcgtaaactgactaatatagcttataaaacgcttgcatttagtgatgtgaaatgctaaattagtcttgtaaagatgcttaagtaatacagatataagcagtcattaaaacagttttttaaagaggagatatggatactatggtcaataataaagctgcagttaattttgagaagttattgagcgatgagagccaagattttaagaccgttcaaattttagatgagactggccaggttgttaatccggaattgatgccggatctcagtgatgaccaattggttgaactgatgaaacaaatggtttggtcgcgtgtgcttgatcaacgagcaactgctttgaaccgtcaaggccggttaggattttatgcaccaactgctgggcaagaagccagccaattagcaagtaactttgcgatgactaaagacgactttttattccctggttaccgggatgtgccacaattagtgcaacatgggctacctttatcacaagcattcctatggtcacgaggccatattgacggtaacaagtatccagaatctttgaaggcgatgccaccacaaatcattatcggcgcgcaatacattcaagcaatgggtgttgcggttgggatgaagaagcgccaatcagaaaatgctgtttacgtttataccggtgacggtgggacttcacagggggatttctatgaaggcttgaactttgcgggtgcttttaaagcaccagccattttcgttgttcaaaataacggctttgcgatttcggtcccacgtgaaaaacaaacagctgctgtaacgttggctcaaaaaggggtcgcagctgggatttctgccattcaagtcgatgggatggatccactagcagtttatgaagtgatgaaagaagcgcgtgaatttacaactgctggcaacggaccggtcttaattgaaacattaacctatcgttatggaccacatacattatcaggggatgatccgactcgttatcggaccaaagaaacagacgatatttggttgaaacgtgatccactcgttagaatgcgtcgtttcttaactgataagggactttggtcacaagatcaagaagaccaattgatcgaacaagttaaaacagacattaaagcagccatcaacgaagcggatgctgcgccaaaacaaaaagtcacagatttcttgaatgttacatttgaagaccaaccacaaaacattaaagaacaaatcgcagagtacagtgcaaaggagtcgaattaagatggcacaaaaaacgatgattcaagcaattacaaatgcgctggatttagaacttgcagatgataagaacgtcttgattttcggggaagatgttgggaagaacggtggggttttccgagcaactgaagggttgcaagctaaacatggtgaagaccgcgtttttgatacaccgttagctgaatctgggattggtggtttatcaatcggtttagcactagaaggcttccgccctgtacctgaaattcaattctttggtttcgttttcgaaacaatggattcgattgctggccagatgtcacggacacgttatcggatgggtggcacacgcaacatgccaatcacgattcgtgcaccatttggtggtggcgtgcataccccagaattacattcagataactttgaaggaatgatcacgcaaattccagggattcgcgtggttgtgccaagtaatccatatgatgccaaaggcttattgatttctgcgattcgttcaaacgatcctgttttgtatcttgaacacatgaaattataccggtcgttccgcgaagaagtacctgatgaatcttatacagtgccgcttgataaagcagctgtggttactgaagggacagatgtttcaatcatcacttacggtgcaatggtgagagaagcgattaaagcggccgaaaacctagctaaagagaatattaaagctgaagtaattgatttacgaacaattgcaccattagatgttgcaacaattatcgcctctgtcgaaaaaacagggcgggtcgttattgttcaagaagcacaaaaacaagcaggcgttggggcacaagttgcttctgaaatttcagaacgtgctgttctttcattggaagctccaattgcacgtgtttcagctcctgatacgccattcccatttggacaagctgaagcaacttggttaccaaatgcaactgatattgaaaataaggttaaagaagttattaacttttagtcgataacgaaagaagggacgttagacgtatggcatatcaatttaaattaccggatattggtgaagggatcgcagaaggcgaaattcaaaaatgggcagtcgcagaaggtgacacgattcaagaagatgatgtcttacttgaagttcaaaatgataaatcagttgaagaaatcccatcacccgttagtgggaaagtcgttaaaattttagtcggtgagggtgaagtggcaacagttggccaagtactggttgaaattgacgcaccaggtgttgaaggtaacgatacaccaagtacggcaacaccagctgctacacccgaagcaacaccgactgcaaccgatgcaggtggtgtttaccaatttaaattaccagatattggtgaagggattgccgaaggtgaaattcaaaaatgggcggtcgcagaaggcgataccattcaagaagatgacactttattagaagttcaaaatgataaatcagttgaagaaatcccatcacctgttagtgggaaagtcgttaaaattttagtcggtgaaggcgaagtggcgactgtcggtcaagtattggtcgaaattgatgctccaggtcacaattcggcaacggcaacatctgctgaacaagcaccagctacggcgtcagaatcaacaccagctaaaacaacggcgccaagcagtcaagcagtagttgcgattagtgaccaaaatcggacgattttagctatgccatctgttcgacaattcgcacgtgaaaacgatgttgatatcagtcaagtgccagccaccggtaaacatggtcggattactaaagaagacgtgcaaatcttcatgcaaaatggcgctgcaacaacgacagcacctgctgtagagacagcagaacaaccaacgtcgccagcaacaccagctgcacaaccagttgctgcgacaccatacacctctgcgacaccagaacgggaaacacgtgaaaaaatgtcaccaacgcggaaagcaattgctaaagcaatggtgacaagcaagcatacggcaccacacgttactttattcgatgaagtggaagtttctaaattgatgacccatcgtaagaaattcaaggatgtagcggctaagaaggacattaagttaaccttcttaccatacatcgttaaagctttggtaacggtcttacgtgacttcccaactttgaacgcgtcaattgatgatgcaactaacgaaattgtttataaacactacattaatgtcggaattgcaacggatactgatcacgggctctatgtcccaaatatcaaggatgccgacagcaagagtatttttgccatcgctaaagaaattggcgaaaatacgcaaaaagcattggataacaaattgaaaccagctgaaatgagtggtggttcaatgacaatcagtaatatcggatcaattggtggcggttggtttacaccggttgttaactaccctgaagttgcaatcttaggggttggccgaattgggacagaaccaatcgtcaacgctgatggtgagttggctgttggcaaagtcttgaaattatcactatcatttgatcatcgtttaattgatggtggaactgcgcaacgtgcgatgaacgaattaaaagaattattagctgatccagagctattattgatggaaggatgattttaaaatggttgtaggtgattttgcaattgaattagacacagtagtcatcggttcaggtcctgggggctatgttgcggcaattcgcgcggccgaaatgggtcaaaaagtaactgtgattgaacgtgaaacaattggcggtgtttgtttaaacgtcggctgtattccttccaaggctttgatttcagctggtcatcgactacaagaggcgaaagattcatctgtctttggtgtgacgactactggagcaacattggattttgcgaaaacgcaagactggaaacaacatgaggttgttgaaaaactaactggtggcatttcaatgttgttcaaaaaacacaagattgatgtgttagacggttcagcctttttagtggacgaacatagcttacgcgtgattaaagaagagagtgcacaaacgtacagttttaaaaatttaatcattgctactggtagtcgtccaattgaaattaaaggcttcaaatttaataaacgggttattgattcaactggtggtttaagcttaacggaagtaccaaaagaattagtggtcattggtggtggctatatcggctctgaattagcaggggcctatgccaacttaggtgcacatgtgacgattctcgaagggacagactcgattttacctaacttcgaaaaagatatggtgcaattggtgacaaagaacttcaaagctaaaggggtcgatgtgattactggcgcaatggcaaaagaagctgttgaaactgatcaaaatgtgacggttaaatatgaagtcggcggcaaagaagaacaacttgttgccgattacgtgatggtgactgttggtcgtcggccaaataccgacgaaatgggactcgaacaagccggtattaagatggctgatcgtggtttgattgaagttgatcaacaaggccaaactaacgttaagggcatctatgcgattggcgatatcgttgctggagcagctttggcgcataaagcaagttatgaagctaaagtggctgcagaagccattgccggtaagaaattaacggttgattaccacgcaatgccagctgtttgttatacagatcctgaattggcaacgaccggtttaacggttgcagaagccaaggcaaaaggaatgaacgctaaaagatttaagttcccatttgcagctaatggccgtgctttatcattagcagatacagaaggtttcgtgcggttagtgacgaatacggatgacaacacagttctgggcgctcaagttgctggcgttggcgcgagtgatttaatttctgaattgacgttagccgttgaatcaggcatgaatgcagaagaccttgctctaaccattcatccacatccaacgttaagtgaagcgattatggatgatgccgaattagcattaggattgccaattcatatttaataaatagtttagaatgacgacgcaccagttgagtgcgtcgttttttgattccgctatttctaaaaggattcgacagcttctaaaaaaatgcgttataatgtgagagattaatggcatcagtagaattgaaactggcgcaaatttatgcaaattttaggagcctttatgcaaacgaactatagttatcctttagaaccagactggacgccaactgaagttgtccaagtcatgaaattatataatcttgttgaacaagcttatgaatttggtgcgaaagttgcggatttacaagctgcttatcgtgacttcaaagtggttgttcaaagtaagatgcaagaaaaacaaattgataaggccttttcagaagcgtcaggctattcaatatatcggtgtatgcaggctgcaaagaggagtagtcgaacccaaatcaaaatgacgcttaattagtgaaagtggatgaaaaaatggaacaagaagcattgtatcggttaagtcgttcgctgcaaaagtggatccttgaagcagctgcctatacccgcacacaaattaaacaaccattaacggttagtactaagtctgggcctaatgatttagtgactaatgtcgattgtgctaatcaagctttcttagctgaaaagattaagacggcttatccgaacgcgcaattagtgggggaagaaggtgccggtgaggtgcctgatgattggcaacagggactaactttttttattgatcccattgatggcacgatgaatttcgtgaagcaacgggcaaatttcgccattatgatcggcgtttatgaagacggtcagccgctattcgggattatttatgatgtgatggccgatcaattgttctggggcggtccacagttgggaatattcgaaaacgaagctgccctcaaaaatgctgtcgacgagccgttgcaagaagggttaatctgtgtcaatacacggatgctggtcaccaatgaagcacacttgcaagaggtgttgtatcaatgttcgggtgtgcggatttacggtagcgccggtatcactttcgcccatttgttgaaggggcaagtgcaagcttacatctccaaattagcgccatgggacattgctgcaggtcgggttttagctgagacgttaggttttcaagttttacaatttgatggtcaaccaatttccatgatgcgaaaagaagggatgattatcgcgccaaagcaagcaatacaagaaattgtcacgattatgaatggttcaaatgattaaagataattaaattttcatgaaaaaaacttgcgtattttcaaaaaaacgctaatatatgaagcacagcccatttttttatggtaaaatattagcttgtatacatgagacaaacaacactagtcaagtcactagcgagaggaagctgaaacacttgaaaaaaagagaagacattcgcaatatcgcaattatcgcccacgttgaccacggtaaaacaactttagttaacgaaatgttaaaacaatcagatacattggatggtcacgcagaaatttctgaccgtgcaatggatacaaatgatatcgaaaaagaacgtgggatcacaattctttcaaagaatactgctgttaaatataacggcaaacaaatcaacatcttagatacaccaggacatgccgatttcggtggtgaagtggaacggatcatgaagatggttgatggtgtgttattagtcgttgatgcttttgaaggcacaatgccacaaacacgttttgttttgaagaaggctttagatcaacatttaacaccaatcgtggtgattaacaaaattgaccgcccaggcgctcgtcctgaagaagtcgttgatgaagtgcttgaattattcatcgaacttggtgctgatgaagatcaacttgaattcccagttgtgtacgcaagtgccatcaacgggacatcaagtcttgaatcagatttagatacacaagcccatacaatgaaccctatctttgacacaatcttagatacaatcccagcaccagttgataatagtgacgaaccacttcaattccaagtggcaatgttagactataacgactatgttggccgtatcgggattggccgcgtttctcgtgggacaatcaagatcggtgatcaagtttctgttcttaaacttgacggttctgctaagaacttccgcgtaactaagatttttggtttcatcggtttagaccgtgttgaaatccaagaagccaaagcaggcgatttaatcgctgtttctgggatggaagatatctatgttggggaaactgttacaccagttgaccatcaagaagctttaccaatcttacggattgatgaaccaaccttacaaatgacatttgctgctaatgattcaccatttgttggccgtgaaggtgatttcgttactgggcgtaagattgaagaacgtttacgtcaccaattacacactgacgtttcacttcgtgttgaagataccgacaaagccggcgcttggattgtttcaggtcgtggggaattgcatctttcaatcttagttgaagaaatgcgtcgtgaaggtttcgaattacaattgtcacgtccagaagttatctatcgcgatattgatggcgttacatgcgaacctttcgaaatggttcaaatcgacacacctgaccaatatacaggctcagtaatcgactcaatggcccaacgtaagggtgaaatgcaaaacatggaaagtgatgctaataaccaaacacggatgactttcttagcaccttcacgtggtttaatcggttattcaacagaattcttaacgatgactggtggatacggaattatgaaccataccttcgaaaaatacatgccagtgattaagaactgggaaccaggccgtcgtaacggtgcattagtttcaatcaatgcgggttcatcaacaacttatagtttacaatcagttgaagatcgtggccaattattcatcggcgctggcgttgatgtttatgaaggcatgattgttggtcaaaacagccgtgatacagatatcgccgtaaacgttactaagggtaaaaacttaacgaatacacgtgcttctggtaaagatcactcagctgccatcaagacacctaaagaaatgtcacttgaagaatcaattgaattcttaaacgatgacgaatactgtgaagtaacacctacttctgttcgtttacgtaagaagattcttgacacaagtatgcgtcaaaaagctgataagaaacgtaaaaaaggttaatcattaaaaaccattagaggtagccgcttggctacctttttttgtgcataaatatggtataataacgaacagagtatgctttttaataacgaataggtaggcgtaaattatgattgaacaaaaaacaacagcttatctcactttagaagcggatgcgctacgcattgagcaactattgcgtgctcaaattgatgcgctttgtatgagtcaatgtccaattattgaagaggtaattgatacccaattatttggtttctcgcgcgaggttgattttgcaaaacggatgcaacttattagtgcgccacagggtgcaactttgatgcgtgagttagaagaacgggtcaatcaaattggcatgcaagttgggcaaggacaggctgaatacgaacgaaatagaaattaggtgtaactgtgtggaaaaagtttcaaaaaagtaaaattcagtatttagactattggttattgctaccatatgttatcttatgtgcatttggtgctttaatggtctattcggcgagttcggatttaatgtcaattcgcggaatgaaaccagatgcgtattttaccaagcaattagtgtttatcgcattaggctttatcttgatgatgatcacatattttcttaagttatccgttttaaaaaatcgcacttttctaaaagcaatgacgattgtggttttcttggcgctcatttatttattgctgttaagtcgtttcagaccaagcgcagcgattaatggggctaccgcgtggattcaattgggaccactgaccattcaaccgtcagaatttgcgaagttattgattgttatttaccttgctaatatgctctcgcgtaaggaaaatgaactggccgacggatttgttgataatttaaaattattctttagtccggttgtattagtcgctggaatcatcctactggtgtttattcaacctgatttagggggcgctagtatcttggctgctgtgatggtagtcatgttttttggcaccggtatgtcatattggtatggtttttcgctgattacagcggtcacaacaacggttatgattttatttagtattttacggcactttaacttttcaacgaacgttaattcttataagttcaaccggattttatcgtttttacatccatttgaattggaaaatatgggtgggagtcagttagtgaattcctactatgcgattaataatggtggttggtttggcttggggcttggcaatagtatccaaaagcgcggttacttaccagaaccgtataccgattttattttatcgattaccactgaagaattaggtgtgattgggaccctcgtgattatcgcgttactatttgcgctactagcacggattttttacctagggattcatgcgactaagatgtatcacactttattatgttacggaattggcactatcattttcgtgcaaaccctattcaatgttggtgggttgctaggaatcttaccgattactggggtgacgttaccgttcatcagttatgggggatcaagtatgatggttctagcgattgcactgggaatcgtgttgaacatcagcgcacaagagaaaaaagctgcggcagcgaattagtgaggtgaaagcatgataaaaggggcacgccgattaatcgttgcattgattgtctggttggtcatcctttatggttggccgattatccaaacaccagcggttaatcagcctaaggttgcacaagccccgtcgactgaacggtcaataaaacaaacgccactgacgaaaacacaagggccggcgaaactgattaatcaaccagctgaacaattaattgcaacctatgggcaaccggtcgagcaacagctgactgatgaaaatcaacgacggtggttatttcacttagatagccgacagtatgtcgaagcgctgattgataaccaatccaatcaaacacaacaaatcatggttgttggtgcggacaacgatgtggcgccgtttcatttttttcaaaagcgggctacattaactaagaagacggcgttaccaacttcgctcttagtgacgttacacgagcaacaatttaagttgcggttaacgccggagcaacaccaacaaacgccgttagtgatgtttaaaaaccagacgtttgcaactttagtgatgcagcaagaacgattgacagctgtgatgtatttaaatgcgaaccgactgctacaaactgatttatatcgagttgtttcaaaaacaccagtcccagtggatgagctagcaaagtcgcaacaaccgcaaacagatagtcaacgacaactcgctttggtgcaaacgttgcagacattacgccaaaataatgaccaacctgcgctcacgataaatcaactaccattgcaaaatacacagaatttggtgagtgaattaacaagtacaccaacgcagtggttgactaaaaagggactgcaaaagctgcaccaagtgcgcaaacaagcgacacaagagacggacgcctttttaacagcaaccgactttaaacaggctccgttaagagcagcgggttttccgcagcgcgagcaacttttttattggccacaagggctcaattcccaagggctggtgcttgcacaacaacagaatctagcgttgcaacttgcgattaataatccaagctatcagcacttaacgcttctttgtaccgatgaacaaacaatgatgatttttgactaaatgtaaaaggactgattaaatgacattggaaatcacacaacgccaaggaattgtcgtctggctctattcattacgacaagtaaagcaattacgccgttacggacttgtgtattacacctcgaaacgaatgaaatatgtttatctatacgtagatatggcagatgccgaaactgttatgcaacggttaaaaaaattacactacgtcaaacgagtgaccccttctgaaagaccagctattgatatggatttcagtaatcgagtaggacgctcagatcaagaaattgccgatgcggcagaattagaggagtaatagagatgcggattattgcaggagaatttgggggtcgcaagttaaaagctgtccctgggatgaaaacacggccaacaacggacaaggttaaagaagcaatgtttagtatgttggggcaattttttgacggtgggcaggcgcttgatttatatgccggtagcggtggtctcgcaattgaagccgtttcacgcggtatggatcatgcttatttagttgatcgccaatatgcagcgattcaaacgattgaagaaaacgttgcggttactaaaatgccagaatgctttacaatctggaagatgccagctgaaaaagcgttggtgaaactagcggatgctggtgttcaattcgatttaattttattagatccaccctacaaggaacaacagatgttgcttcagttacaacaattcgtcgaaatggggttattagcaccagacgcgacgattctttgcgaaaccgatacgacggttgattatccaactgacattccgcattacatactgaaacggcaacagaattatgggattacagaagtagcaatctttaaatttattggttaggaggcagctatatgccgaaaattgcattatttccgggaagttttgacccgtttacaaatgggcatctcgatactgttgaacgggcaagtcacttgtttgatcaagtgattatcgcggtgatgactaacgctgctaaacaaccgttatttgacgcaaccactaaggttgaactgattgaagcggcgacgcaacacttggataacgttaaggtaatcgcacaatcgaagacgttgacggcaacctttgctaaagaagtcggtgcgcgatatttgattcgtggtattcggaatgccaatgattttgagtatgaacgtgatattgcggcgttgaatcagacacaagatgctgatttagaaacggtgttattattagcaaagcaagaatttgcttttatctcatcaagtatggtgaaggaaattgcaacgtttggtggccaggttgaacaattggtgccgccggttgtcgcgtctgcgcttgcacaaaaattaggacctgaaagtgattaatatgaataagaataaacgtctattgaagcatctcctatggattgttggcttgatcgtcgtgtttgctttttgctttatcccaacgcattattacgtcgaaggggtcggttcggccgaaaataccaaccagtttgttaaagttaacggtcaacgagatcaacataagggccactttatgttaacaaccgtcgggattcaaggaccagtgacggggttacagctattactgtctaaaacacaaccttttacggagattattagtcgtgatgaactaatgggtgacgatgatactgaagcgtatgatcagattcaaaaatactacatggaaagctcgattaattttgcgattgaggcggcttatcaaaaggcacatcaggaataccacactcaatatctgggtgtctatgtgatgtcaattttagataattcagcttttaaaaaagatctggctattggtgacacaattacggcaattgatcagcatcaatttaagagtgcaaataagttcgtcaagtatgttcaagggcttaaagtgaatcaaaaagtcacgattagctatgaacataatggccagcgtaagactgcgacccgtaaattgattaaattacctaaatcgcgctacgctggtttgggaattacgctgacagatcactcaaaaattgtgacaaaagtgccggttaagattgatgcgggtgaaattggtggtccttctgctggcttgatgtttacgttacagatttataaccaattaacgaaacaaaacttaacgggtggtcgcaagatttctggaacggggacaatggatcctgatgggacagtgggaccaatcggcggaattgataagaaggtactgattgcgagtcaagaaggcgccaaagtctttttcgcacctgatgatcccgtgacaaaagccatactaaaggtagaaccccattatcaaaataattatgcgattgccaaagcagccgctaaaaaaattggtactaagatgaaaatcgttcctgtcaaaaacttggacgacgcattggattatttagccaaacattaaaaaatttgtcggttcgaaagaatcggcaaattttttttgcgttttggggtaattaggaataaggaggtggcgaaaaatgtggcgcgactattggcaacggtatcgtcgattctggtgggtaccttgtttggtgataattttacttagtggtggtgtgttttggcagcatagtcggcaacaacgttttctatcaaccaatcaacaattgatggcgcaatcaactaagcgaaaagtgaaggcaaaacccgtcaaacagaagaaaagcgtctcaaaaggtgggtttgtcgatatcaaaggcgctgtggcacatccagggatttatccgatttgtgttgcaaagacgcgtttatttgaggtgctgaaacaagcgggggatgtgaccgaagcagcggatacgagtcagttgaacttagcgcaaacattgagtgaccaacttattatctatgtgccaactaagggagaagcggtgcaagccgaagaattagtgaaagcggcagacgagccacaggctgcgactgacaatcaagcgggagccagtccgatatcaactgatgctaaaatcaacctaaaccaagcggatgcgacacaattgcaaacgctaaatggcatcggtcctaaaaaagctgaacaaataattgcatatcgggatgagcaagggcagtttaaacaaatcgaagatcttcaaaaagttgggggaattgggccgaaaacgtttgaacaattacggccacaaatttgtgttaattagtttgtgaatggtatttttttgctatactaaaactattaactttaaagggggaattcgtgtgtcagaaaagagaatgccgtggaatcaatattttatgcttcaatcggtcttgttgtcgatgcgtagcacctgtccaagattgtttgtgggtgcgttggtggttcgtaatcggcgaattattgcgggaggctacaacggttcggtggcacatgaaagtcactgtatcgatgttggctgtttattacgggacgggcattgtttacgaacaattcatgccgagatgaacgccttgactcaatgcgctaagtttggtgtgcagacggaaggggccgaaatttatgtcacacattttccatgtcttcagtgtactaaattaattattcaagctgggatcagtaaaatccattatcaaaaggattatcataacgacgaatatgcgtatgaattgattgaaaaatctggtattgaattggaccaagtcgatttaacggcgaatgacgccaacaccctcgttaactttttggagaatgaacaaactgctgagtgattaagaataactgggtttatccagttatttgtttagcaagtttaaatgcgttattactaggacaagcaccacttttttttagctgtcttttgatagtgtgtctactgcgactgtggtgcttacgccaaccagctgtgttaatggtcagtggactggtactgtgtttaggcggttgccatttttggctggcacggcgcacctacgaacagccggttagaccaaataatcaagtatataagattcaacccgatacgatcaaagtggctggcgatcagattcaattaatggcgcaggggcagaatgatgaccaacgtgttgtttgctactatcgctgccagagttcagcggaaaaacgccgttggcaaacgacgaatcagccgttattattagcgggtgatattgaattagagcgtatccaaggtgctactaaccggaatgagttcgactatgcgcgctttatggggcagcaaaagcattgtttttatcaagcaaatataattgacggaacggtctttagacgcattccaccacaaggttggctagattggttccaccaacggcgccaacaggggctgatttatctccgacaattgccaccagcgttgagttttcatgcagaggcgttgttatgtggtgttcgagagtcagatggcctggcctaccagaatgtgttaggtcaattggggattattcatttattgagtttatccggattgcatgtattctactttgtgacaatcattcgtcgattggcaacgctgtgtcgagtcccgcgtgaatgggtgaatgttagcttgttttgtttgctacccctttatgcgttgtttgtggggggaggcacgagtattacacgcgctatcgggctgatcttactacgattaatctgcgaagtaagtcattttcagcaatcgcgtttagatagttggagttgggtattgctggtcaatcttttatggcagccgtatttattaatcagtatggggggattgctgagctatctgatggcttttggattgatttatcagcggcgccatggtacttttacaacggcattttggctaggcttgttaagtttaccggtgtgcttgcggtttaattatcgttggcatatcttgacgattttgattaatgggattgtcgcgccgattttcttaccagtcatgttgggtttgattatggtagcgatttgcttatggcctgttagtcatatgatagtttggttagaagaaggcctgctaacgacgctgtataaaggattagcttggattgcaacgttcccatatgcgacaattactttcggtaaaatccagctaataccactctttttaattgtgataggcacactatggttgatggcaagtactggtcggcgagtaaagtggggctggggggctgttatcagcctgtatgtcattagttttattggtatccactttaatccggttggccgcgtgattatgtttgatatcgggcaaggcgatagcctgttgattcaacaacccttcaatcgacataacctgttaattgacaccggcggccgactagctttaccgcaagaaaagtggcaacggcggcaaattgtgagtcgggcggaaaaagtaacagttaattacctctacagctgtggcattgatcatttagaggcaatcgcattatcgcatcaggatgctgatcatataggggacttaaatgaaattatgcaacatatccgagttaaacggttgatttgtgctgcgggcttaccgcaaaaccggcagtttcaacggcaagtgcggccgcatcttacaaaagttgcaattgagccttatttggcggaccaacattttatgattggtcaccaacaaatcaatgtgttagcgccagtggtggccggaccaggcgggaatgctgactcactcgttttgcaaacgcaaattggtggtgcgagttggttatttactggtgatttagaaaaagcgggtgaagtggcaatcgttgatcgctacccacaattacgcgttgattacctaaaggtgggtcaccatggcagtcaaacggcgagtgatccccagtcaattgcgacgtggcaggtaaaaggggcgttgatttctgcgggacgccataatcgttatggtcatccacatgccgcaacgttgcagactttaaaacgtgcgaacgtcccattttggaatacggctgactgtgggatgctggaatggcgctatggttttggccaagtgccaatgattaaaacaacactaaaggattgtgactaaatgaagacagaacaactaaaaacagcactgaatcgaggaacgtttgcaccggtgtatctcgtattaggacaagagtcagcgctgattgaagaggttagagcgttatttaaagcaacgctttcgacagaagaaatgacgatgaactttgcgagttatgatctcgcccagacggaggtggcgcgggcattagaagatgcggaatcggccccctttttcggtgagcgacgaattgtttttatgcagaatccattcttcttaacaggtgaaaaagttaaaactaaacttgatcatgatttaaaaggattccaagcttatttagaacagccacaaccgacaacggcactcgttatcttcgcgccatacgcgaagttggatgaacgcaagaagattgttaaacaactgaagaagatggcaactgtcattgacgttcaaaagattaatgagcgccaggtccagcagttagtgacagcgcaactgcaaagtgaacaagtcacgattgaaccagcggcaatgacgttattgttaagcaagactaatggtgattacagtcagattatggctgagttacccaaattactgctttacgcgcaacaaagccgggtgattactgaaacggccgttagtgcattagtggcaagtagtattgaagataatgtttttgaattggtgccgttagttttacaaaaaaaggtcggtccggttttagagatgtatcacgatttattgctacaaaaagaagaaccgctgaaaattaacgccatcttgttgggccaatttcgcttgttactccaagtgaaaattctttttgaaaaagggtatagccaaggtaatttggcgagcgtcttaaaaattcacccataccgcatcaaattagcattgcaacaaattcggcacttttctaaggcgacgcttgcccaagcctatctaggtttagagggcattgaagaaaaaataaagactgggcaaggtgaagcaaccttattgtttgaactgtttatgttacaatttgcgacagatgatgttgcttaaagcaaaaaagcccccacaaaccaaatggttgtgggggcttttttgtggttaaattatttagccatcattttgtttaagcgtgacttgtcacggccagctttgttggcatggattaagccttttgttgaggccatatcgattgcgcgtgtagcagctttcaataggtctgcagcttcttcgttgcctgctgttttagcagctttgaactttttgattgctgaacgcattgtgcttaattgagaagcgttacgttggttagctttttcaattgttttcacacgtttcatagcagatttaatttgtggcatgttgttcacctccgatgggtttcactatctttataaaaaagatttttaatttcaacagtcgttattataccaaaatagtgagagtgattgcaataaaaacttgtaaagtatttcaacttgactgcttaaatagtttgaaactgtgccttgcttttgacgctaatatttagtaaacttgaaaagtgcttattgcacaggcctactactctgtttagcgacgttcacccgacgctttacgttgttctaggctattataccagaagggtggaaattagcatggctatttcacaagaaaaaaagaacgaaatcattaaccaatttgctcgtcacgaaggcgacacaggttcagcagaagtacaaatcgctgtattgactgcagaaatcaactcattaaacgaacatttatctgttcacaagaaagatcaccattcatatgttggtcaaatgaagaagatcggtcaccgtcgtaacttattacgttacctacgtgaaagcgatgttcaacgttaccgtgaattaatcaagagccttggcttacgtcgttaattcattttcaaaaagcgggtccgttatgcggacccgctttttttgtgctcaaaaggcttttagtaatcaaaagctgttagtttgtttaaattgtgataaaatatgagttagactttaaggcggatgagttttaaacgaatgaacgactaaaacaaacaaaatagtttggggaataaattcctcaagtgctagaggtgaaagaatgagtaacattaagattatgccacttggcggtgttcgtgaaaacggtaagaatttgaacattgttgaagtggacgacgaaatttatgtattagattgtgggttgaaatatccagaaactgaattattggggatcgatatcgttattcctgatatgacctatttagaagaaaatgcagaccgtgttgctgggattttcctaacacatggtcatgctgatgcgattggagcgcttccttatttcttaaaggaacatgatgtaccagtctttgggtctgaattaacgattgctttagctaaaattacggttagcagtgaaccaaaattacgtaagttccaaaacttccacgtcatcgatgcgaatacagcaatcgattttgaacgcgcaaccgtttcattcttcaagacaacgcatacaattccaggttcattagggattgtcgttaagacggatgaaggacaagtcgtttatactggggactttaagtttgatcaatcagcaatgccaatgtatcaaacggattatgcacgcttagctgaaattggcaaacaaggtgttttagcactcttgagtgattctgctaatgcggaatcaccatttgcaacggctaacgaacgcgatattgctgaatccatcttagaaacgttcaagtatcaaacgggtcggatcattgtggcttcagtggcttcaaatattatgcggattcaacaagtcattgatgcggcttataaaacaggccgtaaagtggttttaacgggtcgtgatttagaaaaaatcgtccggacagcaatgaaattatcgatgattattttgccagatgacgatatcttggtccaacctaaagatttaagcacacttgcaccagaacaaacagtgatcttagaaacaggtcggatgggcgaaccaatcaaggcgcttcaaaagatggcaactagtcatcatcgtttaattcacatcgaagaaggcgacttggtttatttaacgacatctccttcacacgcgatggaaacgattttagcgaagaccaaagatatgatttatcgtgcgggtggcgaagttaaggcggttggcgatgatttacatgcttcaggccatgccaataagaatgacttgcaattaatgttgaatttaatgcaaccaaaattcttaatgcctgttcaaggcgaataccggcaactagcagcacacgctgatattgctcatgaaacaggaatggattacaaagatattttcatcgttggtaaaggcgatattgtcgcttacgaaaaagggaagatgcatgttggcggacaagttgacgcaactgacgtcatgattgacggtagcggtgtcggcgatatcgggaatatcgttttacgcgatcggaaattattatcagaagacgggatttttatcgctgttgttacgattgaccgcaagaataagaagattatcgcggaaccgaaagtcaccgcacgtggttttgtttacgtgaagactagcaaagatttaatggctgagagtgccgaaattatcaaaaatgcggtgcaaaataatctggacaacaaagaatttgactggagtcatttgaaacaagatgtccgggaaaacttaagtcattacttgtatgaacaaacgaaacgtcggccagtgattctaccagtgattatggaaattaatcaaaatcatcgtcgtcaaagaaaagataataaaccaaaggctgaaaaagccgctgaataacatttagaaacaatagcgtctggatcaggtcagttgattctaggcgctattgttttattaattgtcaaaaggaagtgattgaatgggtgacattacgcaatttccagatcagtatgatcggctgatacggatggggaaagtagcgttaaatcaacaaaattggcagcaagcatgcgaccattttgaagctgcgtatcaactagaacagacgttgtcggcgaatttattgtggtccagtgcgctgattgaagctggtgatccgcaaacagcattgacaatcgtcgaagaacaacaagcggactacttacaacaaacagatttagtgcggttttatcttgcattattactgaataaccaccgttttattacggcaaatcaagtgtgggaggcattacgccatgcgacgattgccccgcaagtcattaagacgcttagaatgatgattacggctgcggaattagaataccaagcgaatcaccaagcagcgattcaaaagcaagcagagggcctctataacctcactgcgcacccattagctgaacagctagcaatgttgacgcaggctgaacaattaccacgtaatgtttatgtcaccagtattgcgcccattttaacgaatccttacagtcatgctttcgtgaagacgactgtcattgaaacgctcgtccagctgaatattgaacaattagtcacgatgcaatggtttgaacagacaaaaacttttgtacctgccgatatccaactgatggaggagagcccgacgtttaatgcggtgttagcggcgttaaatgagcagttagccactgaagatccgactttgttagcacaagtgatggcggatgttgagatgggatttgcatatttatatccttttgaagctgaaatcatgtataatcctacggagtgggcgcaagcatggctcaaacagttactgggtccggattataccgcgtcagtggttatttcagaaaagatacaggactgggtgaaaaagttgcaagaaatgacaggaaaacttgatttttagagtagaaaacacctaaatatcgtttcaaaactgactttttttgagcattaagtgtttacaaacgcgctcatagcagatataatcatttttgaattcttcaagtgtaaaaaaacactttgattttagcgcttgaagtattataatattatgtaaaggattatcagtttagtaaatctaaacactgattttttcttgcgaaaatacaggaggttcgttttaatggcagaaaaagcacattacgaaagaacaaaaccccacgttaacatcggtactatcggacatgttgatcatgggaaaacaactttaacagcagcaatcacaaagatgttggcagacaaaggcttggctgaagctcaagactatgcaaacatcgatgctgctccagaagaaagagaacgtggtatcactatcaatacagcccacgttgaatacgaaacagaaaaccgtcattatgcacatattgacgccccaggacatgctgattacgttaagaacatgatcactggtgctgctcaaatggacggtgctatcttagttgttgccgcaactgatggccctatgccacaaacacgtgaacatatcttacttgctcaccaagttggtgttgactacatcatcgtcttcttaaacaagactgatttagttgatgatgacgaattaacggacttagttgaaatggaagttcgtgaattattatcagaatacgatttccctggtgacgatattccagttatccgcggttcagcacttggtgcattgaatggcaatgctgacgacgttaaagctgttgaagaattaatggctactgttgacgaatatatcccaactccagaacgtgacacagacaaaccattcttgatgcctgttgaagacgtatttacgatcactggtcgtggtactgttgcttcaggtcgtatcgatcgtggccaagttactgtcggtgacgaagttgaaatcgttggtttgaaagacgaagttgctaagacaactgttactggtttggaaatgttccgtaagacattggatcaaggtcaagccggcgataacgttggtgctttattacgtggtatcgaccgcgatagcatcgaacgtggccaagttttagctaaaccaggttcaatccaaactcacaagaacttcaagggtgaagtttatatcttgagcaaggatgaaggtggtcgtcatacaccattcttctcaaactatcgtcctcaattcttcttccatacaactgatgttacaggtgttatcgaattaccagaaggtgtagaaatggttatgcctggtgataacgtaacatttactgttgaattaatctcaccagttgctattgaaaaaggtcttaagttcactgttcgtgaaggtggccgtactgttggtgccggtgtcgttagtgaaattatcgactaatattcaacctagttgaatcgaaaaactcgtagtgtaaaaactgcgagtttttttgtgcattaaattcgataaaagttggcctgaaacgactaaaatatcggattttatcgctttttagaccaataaatatttacaatttaggttaaatagtttatgctgattaagtatgcaattgatagattgtgaatataactgtcggagggaaattatgtcagcaaaatgggaaaaaaagggcaccaatgatggtgaactaacctttgaaattgatttaaataaaattagtgaaggtttggacgttgcgttcaaacgtgtacgtaaaaatatcaacacaccaggtttccgtaaaggtaaaatgcctcgccaaatctttaacaagatgtatggtgaagaagccctttatgaagatgctttaaatgcaatcttaccagaagcttatgatgctgctgttaaagaagctgctattcaaccagttgatcaaccacaaattaatgttgaaaaaatggaaaaaggcgaaccttgggtgattactgctcaagtcaccgttaaaccagaagtaactttaggcgactataaaggcttagaagtaccaaaacaaagccgtcgcattacaatcaaagacgttgatcaagaaattgaaaaccgtcgcgaacgtcaagctgaattggtattaaaagaagacgccgctgctgaaaagggcgatactgttgtcatcgattatgctggttctgtagatggcgtaccttttgatggtggtcaagcagacaactattcattagaacttggctcaaattcattcattccaggtttcgaagatcaattagtcggtcacaaagcagacgacaacgttgatgttaaagtaaccttccctgaagattaccaagcagaagaattagctggtaaagaagccatcttcaaggtaacaatccatgaagtgaaagctaaggaattacctgaattagatgacgaatttgctaaagatatcgacgaaagtgttgatacattagacgaattaaaagaaaaaattcgtgaagaattaaaacaacaaaaaaatgatgctgcagatgctgctatccaagatacagccgttgctaaagcaactgaaaatgcaacaatcgctgaattacctcaagcaatgattgacgaagaaatcaacagtcaattacaacaatacttaggtaacatgcaacaacaaggtatcaacccggaaatgtactatcaaatcactggtacaactgaagatgatttgaagaaacaattcgctggtgatgctgacaaacgcgttaagacaagtcttgtacttgaagccgttgtggaagctgaaaacatcgaagcaacagacgaagaagttgctgcagaacttaagagtttagctgaacaatacaatatggaagaagctgctgttcgtagcgtcttatcagatgacatgttaaaacatgatatcggtgttaagaaagcaatcgaaatcattgctgattcagctgtagaagtgaaagacgataaataaggtcgtctgatcaatccaagctttaaatgatgctaaaaagcgggttcaaggtgtttactttggacccgcttttgtgtcattgacggtgtgcgagtaactttactttattctagaccatagttatgctatagtctgaattacgttgtaggggtgtattttaacgactcacagcggtaagcgtatatcgagaaaggggagaatcccagtatgctagatgatacagaaacaactaacggacccgtaacgtgttcgttttgtgggaagtcgcaagatcaagtgaaaaagatcgtggctggccctggtgtttatatctgtaacgaatgtatcgacctttgcaaagagattattgatgaagagtttaaagatgaggccttcagtgatttactagaagtgccaaagccaaaagaaattttagccattttaaatgattatgtgattggtcaaacagaagcgaaaaaagctttatctgtcgcagtctacaaccattacaagcgggtcaaccaaatgtcagtggccgaagaaggcgatactgaattacagaagagtaatattgcgttaattggaccaactggttccgggaagacattccttgcgcaaaccttagcgcggattttaaatgtgccatttgcgattgcagatgccacgactttaactgaagcgggttacgtgggtgaagatgttgaaaatatcctcttgaagctgttgcaaaatgcagacttcgatgttgatcgtgctgaacgcgggatcatttacatcgatgaaatcgacaagattgccaagaagagtgaaaacgtctcgatcacgcgtgatgtttctggtgaaggggtccaacaagccctcttgaagattcttgaaggaacgattgctagtgtgccacctcaaggcggtcgcaagcatccacaacaagagttaatccaaattgatacgaccaatattttattcatcattggtggcgcctttgacggcatcgaaacgattgttaaaaaccgcttaggtgaaaagacaattggttttggaagcaagaatggtcaaactaccaatgaagatcaaagcttaatgcaacaaattgtaacggaagatttaatgaaatttgggattattcctgaattcattggtcggattccgattaccgctgcattggaaaaactgactgaagatgatttggtgcatattttaactgaacctaagaacgcgctcgttaagcaatacagcaagttgatggccttggataatgttgaattagaatttacaccagaagcactccatgcgattgcacatctagcgattgaacgaaacacgggggcccgtggtttacgttcgatcattgaagaagtcatgatggatatgatgtttgatattccaagtcgtgaagacgtggctaaagttgttgtaacgaaagaagcggtggatggcacagccaacccacaactctttttagctgacggacaagaagcgtcataaaaattaaaagactgccgggacaaattagattttgtcgcggcagtttttttgcattaagggacttttgaaacggtacaatgacgcgatttaacggggttaagaagatatgttaaccatgaaactagagagatgtcaacggcgcaataattatttatttatgctaaactaacattcgaaggaaataatcggaggttattatggaagtacatgatgttgaaatggtgatgagtgcggtagctgcttcgcagtacccaactgatcaattacctgaaattgcgttatctggtcgctcgaatgtcggtaagtcttcattgattaataaattaatcaatcgtaagagttatgcccggacatctagcaagccaggtaagacacagactttaaacttttaccgcgttgaaaacgaactttactttgtcgatgtccctggttatgggtatgccaaagtttcaaagaagcaacgtgagaagtttgggcaaattatcgaggcttatttaaccagccgctcaaatctaaaggggcttatttcattaattgacggccgtcacgaaccaaccgatgatgatatcgcgatgtacgtttttgcgaagtattatgatatccctgttttagtggttgctactaagatggataagatctcaacggggaaatggaatcgtcaagaaaaaatcatcaaagaagcgcttgattttaatccagtcgatcaatttgtctgctttagcgcactgactggtgctggtaaagagacagtttgggaatggattgaaaagcaatgtgcaatagggggacaagcataatggaatttaatgactatcaaaagttagccaaccgaacgttatatggtaacgaacaagtgttaactaacttagctttgggcttagcaagtgaaagtggtgaagtggttgatatcgttaaaaaatatgcgttccaaggccacgaactagatgaaaaaatgatgtctaagaaaatcggcgatgtgctttggtatttatcacaaattgcggaatggaataacctcgactttgataaagtcgcgcgcgaaaacattgaacaattaaaacaacgctacccagaaagacacgcagaataaagcgtacaatcgcgttaaccgaaaggcgattgcaaatgacgcacgtttaaaccagcaaaaaggcggtaagacaaaaatgaatttgtcttaccgccttttttgctgtctttgtttaatgcttttctttttgttctgcatctaccttttttaatttatcagctgtttcttcaacttgtgcttcaactttttggcgttcttctggtagtgatgcgaatttatcgaataaaccggttaaatcggtcttgttagtgacttttaagcccatcgtaatccctcttttctaatttgcatctatcataccagataataacggtttcgccaatgattcactttttataaataaatattgcataattatttaattggttgtatgatagtcctaatcagaggaggagataatatgacgattaaaaaattactcacttttgttgggttaccattcatggtaatgttaacgtttttcatgattcagcagcagcccgttttggcagctggacagacggttagccaagtgcaagctaaaaaaacgttggttttgggaaccagccccgattatgcaccttatgaatttttagtgaataaaaacggtaagaacaagattgtcggtatggatattcaagtcgcacagaagctagctgatgatttaggcgttaagttagtggtgaagtcgatggactttgatgcgttattggttggtttggaaaccggtaaagtcgatatggttatttcggcgatgtcaccaacggatgaacgaagcaagagtgttgatttttctgatgtttattatctcggtggtcaatcaatcttagtcaataaagctgatgcgaagatttaccactccaaaaatagttttaacgggaaaaaagtgggggtccaaacggggagtctccaacaaacactcgctaaaaagcaaattaaagatgcgcagattacgggcttggccaaagtcccagatctcgtccttgcattaaagagtcataaaatcgacgggattgtggcggaagaaccagtcgcaaccgcctatgcaagtaatgatccagaactcgttcaaattaatgggaaatttgatttaggcgcagacatgcaaggatcagcgattgcctttccaaaggattcgccaaccttagtcgctgctgctaataagagtatcgggcaaattaaaaagcaaaaattaattccgcaatacttaaagaacgcgggccaactcatgaaggtcaatacgcacaacactagcatgtggcactattggtcatacttcgctaaagggattggctacacattattcattacgattgtttcaattgcaattgggattttaattggggtcctcctagcctttgggcgtttggccaagaataagttggtgcgtgcgctggcagtcatgtatatcgaatttgttcggggcacaccgttgatgattcaaatcatgtttgtctacttcgggattggcttatgggtcaacattccagcacttttggcaggggtaattgccgtttccttaaatagtgcggcgtatgttgctgaaattatccgttcagggatcaatgcgatcgatgctgggcaaactgaagcttcaagaagtttaggcttgtcacaacgcgatacaatgcgttacattgttttaccacaagccctgaagaatatctggcctgctttagggaacgaattcatttctttaatcaaggaaagttcaatcgtttccattatcggggtcactgatttaatttatcaactcaaagtggttcaatcagcaacttataaaggcgttgcaccgatttttgttgcgatggtgatctactttatcatgacctttagtctctcgaaacttttgaactatgtggaaaggaagatgcaacatgcttaagattaatcaattggttaaaaaatatggggacaacctcgtgttaaatggtgttagtggtgaagtccaagctggtcaagtgattgttgtcatcggcccttccggtgggggtaagagtacgttattgcggtgcttgaaccgtttagaggacccaacgagtggccaaattctgtttgaaggcaccgatttgatgacgttatctgaaaaacagcttgatcagattcggacaaagatggggatggttttccaaaactttaaccttttccccaatttaactgtcctcgataacttaatgttggcgccacaaaaagtgaagaaagaatcagcggccgaaacaacggctaaagcaaaagcgttgcttgaacgcgttggtttagcggataaggcggatgcttatagtgatcaactctctggtgggcagaaacaacggattgcaattgcgcgggcattagcgatgtcacccgacgtattgttatttgatgaaccgacatctgcgctcgatccagaaatggtcggcgaagtcctcaaggtcatgcaagacttagcacaagaagggatgacaatggttgttgtcacccacgaaatggggtttgcgcgcgaagtggcggatgaagtctggttcatggcagatagtcaaattgtcgaaaaaggggaccccgaagccatttttgaccatccgcaagaagaacggacgcaacaatttttagccaaggtcctagcacaatagttgcaatttagccaaaaacacgtaaaatagaaagacgaacacttgttttgaattaaaggagtggtgtttttggcaagcgaacacattgaacataaattagcactcttacccgcattacctggttgttatatcatgaaggatatcaatgccaagattatctatgtgggtaaagcaaaaaatcttaaaaaccgcgtgcgctcgtatttcaagagtagtcacgaaggaaaaacggccaaattggtctctgaaattgtcgattttgaaacaatcatcacatcgacaaataaagaggcctttttgttggaaattacgttaatccagaaacaccaaccttactttaatattaaacttaagcggggcacaggctacccctacattaaaattacgaatgaacgcgatccgcgcctactgatcacgggggatgtcaaaaaagatggcggcttttattttggcccttatccggacgtgtatgccgcccaagaaacattgcgattcttacaacgggtttatcctttacgacgctgtcagggacatcaagggcggccctgtttgtattatcatatgggtcaatgtttgggcgcgtgtttcaaagaagtgcctgagagtgtctatgcggcccaaatcaaggagattaaacgtttcttgaatgggcaagttgatccggttaaaaaagaactgacggccaagatgactacggctgctgaagagatgcagtttgaacgcgccgcagaattgcgcgatcaactccactacattgaagccaccgttgaaaagcagaaaattatttctaacgataataccccgcgcgatttatttgccttttatttggataagggctggttatcgattcaaatcttcttcatccgccaagcacggttgattcggcgtgaaaagcggctcttcccgtgtgtcagcacacctgaagaagaattggcaacctttattttacaatggtacaaccgcaagaataatgtgttaccccgcgaaattctggttccagaaggggtcgaaaagaaagtcctcaccgaaattttgaatgtgccgattcgcacgccgcaacgtggtgagaaaaaagcgttgatggaaatggcgcagaaaaatagtcggcttgtgttggaagagaagttccgtttattggaactcgacaaccgcaagaccgttggggcgcaagatgagattatggacgcgcttggcttaccacatggccacgtgattgaagcgtttgaccattcacatattcaagggactgatcctgtctcggcgatggtcacgtttgttgatggccgtgccgagaagacactctatcgcaagtataagttaacgcaaacgacagatcgcgcaggcgccaacgaagatgccaatacgcgggaagtcattttccggcggtattcgcgattgctcaaagaggataaaccactgcctgatttgattttaatggatggtggaattgtggagctcaatgcggctaaagacgtcttagagaacgaattagggctatcaattcccgttgcagggatggtcaaggataatcatcacaaaaccgcctcgttgttatatggggaagttgatcaaaccattcagttggatccaaagagccaagggttctacttactaacgcggattcaagaggaagtccatcgttttgccatcagtttccatcgccaattgcggggaaagaactccttgagttctaaactcgatgatattaagggcgttggtcctaagacgcggacaaaactcttgaagaattttggttcgatgaaacatatcaaagaagcttcagtggcggaactcgaagcactcgggatttctaagactgtggcgcaaacgattaaattatcactttaaaagcctaggtcagacaactattatttgtctgacctaggcttttttagggtgctaatggttggttaatggttttttttacccacttagtagccaaaacgaagattaaggcaactggatttgaagtaccaacctggcaagatgcattacaaaaatttatggcaaaaatcgattagtataattaaaaaggtgagtaatcatatgattgctcaccttttttaattatactaataacgcactaaacttcttttgcaccataaatttaatattattggctgttcgccgtgtgatgtttaagtctgcggcgatttcttttaggctggcgttgtagaagtagcggaggactaagaagcgtttttcgcgtggggtacagacttgatagaggcgttcgaagaggtcgttgcagatggcggcgtcttctgggttgcagtagggatctgcgacttggtcgaggtagtccatcacggaatcatcatcgtttatccggttaacgaagccgattcgcttgtcgtggttattatccttgcggaaggtcatcataattgcccatttaacagcctgatacgcgtaaaccatgaagcggtgggtttcgacttcaatattgcctgggaaatgatcgtaggcttcgacaaaggcaatcacgccaatttggtagagatcggcgaagttattgcgctgccgtggaacgtggagatctttgagaacaccatagatgagggtgtcgtcttgtgtaataaaatcaaaggcagtttgtaaatctgatcgggtcattgtcaagcatcctgtctactatgagctcacagtgtgaattaccggtaagttcactatagcgggtttgcataaggaagggtaatcgccgattttagcggtaaatcaatccgtttcagctttaatttgcgcaaatgcattgaaatacaaatgaaaactattgtaaatagcgacttcgggttaatttataattggcgtaatttttgaattagtgctttaacacttttgatatagcactgaatgtcaaatacgctgaattcggggtattcatggattacggcttggtaaatgaaattttccttttgcatttcaagtgcgttgagtaatccgagtagttcagtagctgttttcggaacattcgagcacagatggcaatggcaatcatcgaagcgatggacgatgcttggcttgaaacaagtcttgagcttgatttgatagccgaaattagtggcacacacagtgagacagccaagttggactttgccaatggctgcacattgatgaatttcagtatcgatttgacggcctttataagggaggatacaggtacagtcatttagcaatgtcacgtagagatggttatcgctaacttcgtaatcacggacgtagtggagcgctaaccacggtgcgttttgatgagccgtgccacttaatggtaaatactgatattcgccattgatgtgtggaatcttacgataccaattgaaacaatggcaaaggtaccggggttgtgagaagtccatgatctgatggcgattataagcgcgcattagttgccgggtagaacgcggactaatttggagaccggttatgcggtctaacacaagactttgcgattttttatagggaataatcaccattgtgtcactcgtaatactagtttggtaagaacggggaattgacgattgatccagctcacagaagttataatcaataccacgtttgatgatgagtggcacgggaagacattcatgggatgtattgacatgtttgggatgtagtagaaacatcgaagacctcctttattgttaacctcttgagaataccaatgatgggaatcgcttacaaaacaattgtgaaaagattgataaaatcctaagtgcttgttaatcttttcctcattttcggcatataattggtgcaaatccacttttttatggcatactgttattagactatatgttatgggggattttagtagatgaaagtacgtaaagcagttattccagcagccggattaggcactcgttttttaccagctaccaaagcgatggcgaaggaaatgttgccaattgttgataaaccaacgattcaatttatcgtggaagaagcaaaggcttcagggattgaagatatcttaattatcactggtaaaggcaaacgcccaattgaagatcactttgattcagcaccagagttggaacaaaacttgaaagccaagaataagaccgctatgttgaagatggtcaacgaaacgactgatatgggggttaacttgtacttcattcgccaatcacatccaaacggattaggggatgcagtgcgccttgcaaaatcattcgttgctgacgaaccttttatcgttatgttaggtgatgacttgatggaagataaggtgccattgagtaaacaactaatcaatgaatatgaagaaacacatgcatcacaattagccgttatgaaggtgccacataatgaagtggacaaatacggcgtgattaacccagaaaacaaagttaaagatgatttatacaacgttaagaacttcgttgaaaaaccagctgttgataaggcacctagtgatttagcaatcattggtcgttacctgttaacgcctgaaatttttgatattttagaaaaccaaaaaccgggtcttggtggtgaaattcaattaaccgatgcgattgatgaattgaacaagacccaacgcgtcttcgcccatgaattcaaaggccgtcgttacgatgttgggaacaagttcggttacctagaaacaagtatcgaatatgggttaaaacacccagaagtgaaagatgatttgaagaaatacatcatcgacttagcagaagaattaaaaaaagacactaaaaaagaaaataaataacctgtaaaaaacgttcaaccactccgaacattggaatggttgaacgttttttgttgttttttaaataatacggccctcacagtgatccacttcatgttggataatctgagcaatccagcctgagaaagctcgcctatgcggtttgaaggcttggtcttgataagtgacctcgattgtttcataacgcgttgtcggacgttctccgtttaatgagaggcagccttcagtcgtttgataaggtttggcttggcgcacaatctgtggattcacaagaatcacaggtaagacgcccatttgaacgatgataatccgtttattgatgccaatcatgttggcagccattccgacgcaacgttctgtgttggcttgtaaagtatcacgtaaatcagtcatcacatcggtatcagctggtgttgctggaactgctttttgagctaagaattgcgtgtcacgcataatgggtttaatcatagtagactccttgagtagtagttcttccattatagcagaaaataaactcattcaattctcatttagtgaaagtccgccttatctgcgggcttttttaatgcgattatttagggattagagtctgcttttcaatattgtggtaaaaaattcgacaaatttggattttatgcttataattattaacatactattataaaacgtctaatctaatcttaataacgcgttaagagcgatgagagaagttggtcaggcattaagggaggatcacatgaagaaattactcgtatttttaggcagctgtttactcgcaggcttatttgtatttgggagtcaagtgaataatcaggttcaagccgctgaaaaaacttatgaaatcggtacggatgtgacctatccaccattcgagtttgcgaatgagaagaatcaatatgtcggtattgatattgatatcatgaaggcagttgcgaagtccgagggctttaaagtgaatattaaaccgttgggcttcaacgcagcggttcaagccgttcagtcggaacaaattgacggcgtgattgccgggatgacaattacacctgaacggcaagcaaaattcgatttcgctgatccttactacaagaccggggttgtaatggccgttcaaaaggacagtaagattaaaggcttagaagggttgcgcggtaaacgtgttgcgattaaaacagggactgccgctggggcctatgcgacggccaaagcgaaagaatatggctttaccaccgttacgtttgatgattcagataatatgtataatgatgttgtgaatggtaattcggcagcctgttttgaagacgagcccgttatgcaatatgggattaagacgggcttgaaactcaagattgtcaccaaacctgctcaaggtggcgaatatggatttgccgttaagaaagggagcaatcctgaactcatcgctaaattcaataaaggtcttgctaaattaaaagcaaatggtcaatacgacaaaattaaagcaaaatatttaagtacagaatcaactaaaaaagcaaccgttgatcacagcttttttggattattgaaagaaaataaagatgcgttgttgagcggtttaggccagacgttattattaacagtcattgcgattttcttcgcaacgattttcggggttttcttcggattactcggcgtattacctaaccggtttgcgcgtagcgtttcagatacggtcatctatattttccgtgggttacccctcttggtgcttgcattattcatctatactgggattccaagtttaactgggcagaagattccagcgattgtggctggggtcatcacgctgatgttcaatgaaggggcttatactgcagcctttgtcaaagggggcattggcgcggttagcaccggacaaatggaagcagcgcggagtttagggttaccatatggtaaagcaatgcggcgcgttgtgttaccacaagggatccgcattatgattccatccttcattaaccaattcatcatcacattgaaagatacgtcaattttatcaatcatcgggattctcgaattgacacagacgggtaaaattatcatcgcccgcaaccttgaagggttcaaaatttgggcaatgattgccttaatctatctgatcgttatcacgttactcacgtggttatcgaagtacattgaggggagaatagataactaatgaatagaattgaagtgtctcatcttattaagaattacggcagtaacgaagtgttaaaagatttggacttaacggtcggtgataatgaagtggttgtcatgatcggcccctcaggttcaggaaagagcacgttcttgcgctgcttgaatcgcttagaagaacccacgagtggtgagattatcgttgatgggtacaacctcagtgatcctaagagtgatttgaaccaaattcgcgaaaaaatcgggatggtattccaacactttaatcttttcaaaaatctaacggtcgctgaaaatattacactcgcaccagtggaactcggtaaaatgacgccggcagaagcaaaagaaaccgccaagaaactacttgaaacggttggtttatcagagaaattcgatgcaaaaccacaatcgctatcaggtgggcaaaaacaacgggtcgccattgcgcgtgccttagcgatgaaacctgatattctcttgttcgacgaaccaacatcagcgctcgatcctgaaatggtcggcgacgtgttggccgttatgaagcggttagccaaagaagggatgacgatggttgtcgtgactcacgaaatgggctttgccaaagaagtggccgaccgcgtcatcttcatggcagatggacacattgtcgaacaaggcacaccacaggaaatctttgacaccccacaaaacgaaagaacaaaagacttcctgaacaaggtactaaatgcatagcgtgtgtttcaaaaagcacgtttaacgccaaccaaaaaagcggcccaccattacttggtgagccgcttttacgattcttaggtctttagaatgttagaatagaaataggaactagtagagaaaagagggattacgatgcggttaggcttaaaagcagggattaacgatcagcaaattgctgatcgaatgcagtatcagccaacgtattttgaatttcatttaacagccgaagatgtcacgccaaatgggctagtacgcttacgcgaaaaaattcgttatgtacgcagtcagcaggttgaacggattattttacaccacccaatgagtttcgaagggcatcatattgaactgtcgatgaatgaagcaagttcgccagcccgataccgctttttatggcaatcaacactcgatttattgcagttagcgaaagctgaagatgtccaactattggtgcatggctcttatgatgatccaattgaagaattgacgacgggttacagtaatattacggatgccattcgtgttttgttcaagcgcctcgattatttacagcggattggcggacaaaatattatgttcgaaaattcaatttcaccgattttctattatggcaatccgatttttgatcaggccatctttgataaaggttaccgcttagcgtttgatacgagtcattgttttatcaagttgcagggtgatcagaatgctttcttgcagagtctggcaactttgcgtgagcacgttgttcattatcatctggttgattcgatgggtttgaagcatgatgggttgcaattagggactggcaaaattgactgggcccgcgtattgccattgttaaatcctgatgccagttcgatctatgagattcaattagccgatcaaaatgatgcacgagaaatgattgcgagtcatcgttatttaacgcaacttgaacaaacattatccgagtagaattttgtcagcagcaacgcgaaaaccaaacaaaggatagtcccccgtctttgtttggacatacatataatgttggtagtagtttttttgatttaataataggctaaattcccactgcttcagcggctttttgtctgcggcctttaactgcagtaatagtcgtggctgttcgtcaacgacggcgagctcaaagtgggcgataggttggagctcttcagggccttcgaagtagatgccatcgtttttgggtgtatcagctaatagctgtagtaagtcaatgacgcgcatgataagtcgtcctttctaatagtgcgaaaatcccggcaataatcagccaacaaacacccgacaagctagcggcgatggttaggataattgccattggtgttagaacaccaatgagccaagtcgtggtgttgactgttggcacaaatgaaaacagaccagtaacgaggcagaccgcaatgactgtggcaataatccctggaatcgtacctttaaaatcagctgcggataagtcataaccaccgatggcaatcatgctagttaagattaaccagagcaagagagcacccggttgcgtcgtccagagctggctgaataagggaccgatggcgtttaactgccaagtgggatgttcagcaaaggtcatccacgttgcaaaagtgggccgtgctaataaccaagtcagtccgaaaatggcggctgaacaaccaaaaatcggggcaatcccaatccagagattaccaattgttggccaaagacggccggaatggtatcggtgattgacatggccaagcgagtgatcgggattatcccgtagatttaattttaagagttgcatatcgataatttggtgttggaagattaaacaggcaacagcatggctgagttcatgaatcacggtgcctaggccgccaattaaaagttgtgagtaatcccaccaatgggctaagcgccgtttagttgaacgattgattagtgttaaaatcccggcaaaagctagtggtagcgcaattaccagtaaacaattaagtaacattgattgcaatatttgcgataagttaaatgaattgggcatgataactcctttgaacgactttatgtaagcctacaccaaagtttatcgcggaaacaaggggtgttaatcaatttatgtaaaacgcaaaaaaaagcccccaaatcagattcgatttgggggctgtatgctgcttaattatttgtcagaaaagattggtgtttcaatctgttcaacgtatttggcaccaactggttctttgtagagttcaattccttttttaataaacatattggctgctgcgattttagtcatcgcacttctaactgtttcggcgtctaagttgtcatcaatattgtttaagcgcaatacacgactcttagcatcactgtttttaaattctaagcaaagttgtttcatcttgaattcctcctcaaagattggtatgttttttatttagcgatataagcggatttagtggttagagtagctgttgcaaatgtgtcacctgcgtggagacttgcgagggcttcgccaactgtttggatttccgtggcttgaacgtcttcttttacggcggtcatacgacgttgtaaactttcatttggatagtctgtattttgtaattcaaaagcgatcgatgttgctaaccatgatgtttgcatgtggattcctcctaaagattagttgtaagcgtcaccggtgaatgacttacgctaatgagtaatgcacgatgccgataaaatggtaaaataatctcagcttaccaagcggatttctaaaaaaaagttaaagaaattgtgaattaccagacgtttcatgaaaatttagttatagtaataattagacttatagatgaagagggatattatgcaagaagtggttattatcagtgcaaagcggacaccgattggtaaattggggggccaacttgcaagtttaagcgcggttgaattggggacagttgctgctaaagcggcgattgaagcagccgggattgatccaactcagattgatcaagcaattttcgggaatgtcttacaagccggttctgggcaaaacgttgcacggcaaatcgctttgaagagtgggatgacacaatcaagcacagcaatgacagttaatgaagtttgtggctccggcctaaaagcaattcggttggcgcagagtgcaatcgtcatgggcgatgctgacatcgtcttagttggcggtacagaaagtatgtcacaagcgccttatttgaataaacaaatgcgttttgggagtaaatttggggatcaaacaatgattgatagcatcagtagcgaagggttaaacgatgcgtttacgcaccagccaatggggattacaggcgaaaatgtagcagctaaatacggcgttacgcgtgaaatgcaagacgcttttgcactcgcttctcatcaaaaagccgcgcaagcgacccaagctggttggtttaatgaagaaattgtacctgtaacggtgcaacaacgcaaagcaacgcttgaagtacaacaagatgaaggtatccgcccaacgacaaccatcgaagcaatggcgaagttgcgcccagcttttcaacaagatgggactgtaacacctgccaatgcttccggcattaacgatggcgcttctgccatgatcgttatgagcaaggaaaaagctgctgcactcggattagtttaccaagccactttggtcggctatcaagaagtcggtgctgatccagattacatggggtacacgccggtcgatgcaattcaaaaattattagcgcaacaaaatcaaacattagccgatatcgatttattggaaattaacgaagcgtttgccgcttcaagtgtggccgttcaaaatgggttacaagtcgatcctgctaaagttaatgtggccggtggcgctattgcgttgggccatccaatcggtgcttcaggcacgcgcatcatgacaacgttaatacaccaattgaaacggacgcaccaaacaacagggattgcttcgttatgtattggtggcgggttaggaattgcttttgaaattcaattaaatgaggcatggtgtaatgaaaaagcctaagttctatcaattaacgaaggatgaacgtttagcaacgcttgttgaacaaggtcacctaagtcagacggatgctgattgtttagcagctgcagaacccttgtcagatgagatcgctggtaatatgattgaaaaccaaattggccagtaccaagtaccgcttggtgtggtgcaagatttattagtcaatcagcaagtctatcaagtcccgtttgcgatcgaagaaccatccgttatcgcggcggctaataatgcggctaagatggcacgagctaatggcggctttgtgactgaacaactgacgcggctgatgactggtgaagtcgtgttagagaagctagttgacttagtagcggctaaagcttggattagtggcaacaatgaccatttatttgaagttgcacgggctgcgcatccatcaattgttaaacgcggtggtggtcttcaaaaaatcacgccgacgattattgacgaccgctttttgaaacttgaattgcaaattgataccaaagaagcgatgggtgccaacattgtgaacacaatctgtgaagcgatcgcacatgctgtgcaagaacagttgggcggcaaccttttattgagtgttttgaccaatgccgcgtttgaatccgtggtgaccgcaagtgtgacgattgatccagctaccttaacaactgcgacgcttgctggcgaaacaattgccgaaaagatgattgcggcgagtgactttgccaaagtggatgtggcgcgcgcagcaacccacaataaagggattatgaacggcatcgatgcagtggtgttagcgacgggcaacgattggcgcgcaattgaagccggcgtgcatagttatgctgctagaaagggtgcttatcaaccgctttcgagttgggaatggacaactgatcagcaactacgcggtcgaatcgaactgccactgccagttgggatggttggcggatcgattggtattctaccaaccgtgcagattaatcagcgcttgttaaaagttcagaatgcgcgtgaattagccggcattatcgcagctgttggcttagcacaaaattttgccgcgctcaaagcacttgtgtcagacgggattcaaaaaggacacatggcgcttcaagcgaagtcgttggcgattgccgctggcgcaaccgagactgaattaacgcaattattaccattattattgaaagcgacacatttaaatacagcaacagcaaccgagctgttagcgcaactgcgtgctgaaaacaaatagattggaagtttattatgcaaatcggaattgataagatgggcctttttacgcctaatacctacttagatttagtgatgctagctaacgcgcgaggcgttgatcctgacaaatacacaattggaattggtcaagatcaaatggcaattgcccccctcagtcaagacagtgtcacaatggcggctaacgcggctcttgaagtgttggatgatgataatcgtgattcaattggtttattaattttaggcactgaatcaggaatcgatcagtcaaaagccggcgccctttatgtacaacgcttattaggattaaaaaatgcccgtgcttttgaaattaaagaagcttgttacggtgcaaccgctggtttgatgaccgcttatgactttgtagcggcacatccagagcaaaaagcattagtcatcggttctgacattgcccgttatgggctggatacaccaggtgaagtgacacaaggtgccggcgcggttgcaatgatcgttagtgcagcaccacgtttgttggcgttagaaccggcaacggccatccacagtgatgacattcaagatttctggcgccccaactattcaaaagaagcttttgcgcgtggcaaatattcaactgaacaatacatcgaatttttccaagcaacttgggcagactatcgcgctcaaactggccgcacaatttcagatttcaaagccttaacgttccatttaccatacacaaagatgggtttgaaggcattgcggacaatcctgccaggagcaacggaagcagaacaagcacatttattagaccgttatcaagaaagtacattgtatagccgtcaaattggtaatatctacaccggtgcgttatacctaggcttcctttcattattggaacaatcaacgcaattggcagccggcgatcgaattggtttattcagttacggttcaggtgcgatcagtgaattcttcaccggtattttgcaacccggatttgaaaaacaattagccggtgcggaccacaaagcaatgcttgctgcacgacgtcaattgacgatggctgaatacgaaaatcaattccaagcagaactaccagaagacggtagcgaatatgaaattgatttggcaatggacaacgcgtcaatcattttaaaaggtgttaaggaacacgaacgcaattatcaagttagagattaataaaaaacagctatgtatcctaaaaactgccattaacagtattgttaatggcagtttttttagctatttctgataaaaataacaagtcagaaatgatggaaaaacttttttaaatttaagagcattttgattgtatccggtcacagaaggtgctatattaatggtgaggaaagatagcttggtaagtgaaaccaagttagctttaaatagatttaccactttaaaacacaagcaccagatttgaatgtacgacacatcaagatttaaagtacgaaaaagaaattgcaaggcgtggttccaatggaaacataagtgtaactcttcgtagtattaagatctaagtatatcggaggctgatgtctgttaaagaatatcgctcaagtagtaaacacgaatttaatcgtcatcgctaaaactgcacatgcgggtcaaagatagacgaccaaactagatcgagtgaaacgattagcagtgggctagaccaacgattaaaaacaattgaataaagtatgaggtgtaacattatccagaatgtaaaacagaatcagctcgtaacaaccaagctatcaacctcaacctaggggattcaagcatatcaaagcttgaatccttttttttatgctcaaaatacaatataaatagccattcactatagataacaaatgaatggctttatttttaattaggcgtgggcttgcactgcctcaatcaacgcgtctaaattattcacaatcgtgccgttttgtttaattaagccggttgtgtaaaggtttaagtaatggaattggttttcggcgatctcttgtaaagccgctagtttttgtggatttgtagcaccttgttggcggctgtcggtgtataatccgatcattggaatttggcgaccgtatgccacaccgatttcactagcaacgccaacatcgatggtgggaccatccaaaacagcaatgacgagatcgctagcaacgagttcgtctgtatcggcttgtgcgatcatttcagagctggcataagcattcttgtcattaattgcggcgttttcttgtgggagatagatatcgacaccaggaatcgattggcgcagttgagcaacaaccttagcgttataatcaaagtctgctgctgagaatagagcgtttgcgaaataaattttcataagaattcctccaagttgatttcctttattgtatcaaattagtggtgaaatgctgtacaattaagttaatcagttttggaaggggattcacaatgcgcgagattcaagaaacaccagggcaagtaacgtttaagtcagcttggcgagattattttaaaggttattttgattttacggggcgaacaacacgtgcgggttattggtgggcgatgttgattttaatgattgtttggttcatgccatttttcgctttgctatttgcacaagctgcaaaggtgcaactgaagatgagcggtgcattagtgctgtacataatcgttatcgggttgcttggggtactcacgtttattccaacgttggcgcttagtgtacggcgttatcgggatgctgggttaaatggtcgcggagcagttgtattgtggttattgaacgggtttgcatcccgttttacatcgggcaatcaggggcgcgcatggacgttaatttcggcgttgatcggtttaactttatttataatcacgttattgaaaacagacacgattacaaccaacagcgacaatccactagttgctttcttcttaagaaagagtgcgtcacaaccgaaacggtctgagcattaacgaagtttggcgaatgattgtgaagcaatcgtttgccattcagggttaaccggaaggatatgacttatagaacacgtttaggcgattaaagtccaaataaaaaagcggtccatcaacaaacacatgttgatggaccgcttttttgcgttataggtcgcgttttagtgttaatgtcacaactgcttcaactcgtgccgtttgggggaacatgtccaatggttggattttttccacttggtacgtatgcacaagggcttttaaatcccgtgcaagggttgatggattacatgagacgtagacaaatttcaatggccgactgtctaaaatggcatcaattaatttttgatctaagccagtgcgtggtgggtcaaccaccaaggcagttgggacaaagccattatccaaccattctgggaggaggtcttcggcagcccctacggcatattcaacgttttgaatgtcattgatggctgcgttgtgtttagccgcttcaattgaatcggcaatcgtgtccatgccgcgtacttctgcgacttgattggcaagactcaagccaattgtacccaccccacaataagcatcgacgaggcgatcttcaggtgtgagatcaagtgcatcttgaactaagttatacatcttagccgtttgaactgggttcaattggaaaaaggcgcgggcagtcaattcgaagtgaacgccgtttaaagtttccataatcgtttcttgaccagccagatgaatcgtttggtcgccccaaacgagcacgtttttccctttgttgatattttgcatgattgaaaccacttcgggcaattcagcttggatggctgtaatcaaggcgtgcttttgcggtagtttaggggagttggtaatgaaggtcagttgcgcttcaccggttgaaaaagattcgcgaacgaccaatgtttttaaaatcccggcattcttagtttcatcaaagacgggaattccgagtgattcgactaatttcaagacggttcggatgattttcattgttaaatcggtttgggttgcgaattcaggcaaatcaattaaagtatggctacttggagcgtataagccagctgctaaatgaccgtcgatttcgcggacttggaattgtgctttgttgcgataatgccaggggttttccattccgactgtatcggtaatattgtatttggcgtagccttgtggtttgaatttttcaagcgcttggacgacgacgtcttttttgaaggcaagttggccaggatagcttaagtgttcaagctcaatcccaccgacttggccgtaagtggcatccttaggggtaacccgttgtggtgaagcttggcgaagtttgtggacttttgcttcaatgaaacgaggggcaacgttggtgacttctgcgacaaccacttcttcaggaagtgcgcctggaataaagacaattttgcgtttgtaatagccaatcccttcaccattgatgccgattcgtttaatcgtcaatggaaaacgttggccgacttcgacttggtttgtttgttctggcatttaatccgctcctattaatataaaataatgatactcgtttttctcattgcattcagtataacagacttagcactgaaaaatcgcttcaatagtgggaattaagcagtgacttttgtccgggtgcgccatttatgctatgctacaggaagtcaaagtaaggagcgaagccacatgaatttttgggaacgaaatcaatttttaatcgccatgctgattgtactcggaattggcgtttatgccttccaacacaagagcttaccactgatcatcgggactttagtgctcgccgtcgtggtcattggatttaaagtctatttaaacatcaaagcaacacgtaacaagggagaataacatgccgaagattaccaaaataacggcacagaaaaaatcaggccgttataatatttttatcgatgagcaattcgctttcggcgtgaccgagagtgtcttgattaaataccgtttagcaaaggatttagagattgatagtcaactgcaacgcgacattcaaaaagacgatgataatgccaaagcgtatcaattggcgctcaattatctgagtcaccaattgcggacggaaaaggaactaacgcaatatttacgcgaacacgagatcactccagaagggatccagactagcttggcaaaactacgcgagttacattatatcgacgatcaggattacgccgatagctacgttcgtactgtgattaataccgcggataagggccccaaagtggtccgccagaaattaatccaaaaaggcgttagtgctgcccatatcgatcaagcacttagtcattattcagtggatgatcaagttgcggttgggttagcagctgctaagaagttggcgaagaaataccgtcatagttcattctttgaacagcagcaaaaagtcaaacaaggtttaatgcaaaaagggtttggcggtgacagccttagtttaattattgaagcgttggcccttgaagccgatgaagatagtgaagctgacgcgcttgctgaacttggtgcaaaaaaatggcgccgttatcgattactcgaaccacgagaacgccggatgaagatgcaacaagcgttgtatcggaaaggatttaatattgatgcaatcaaccacttcatcgacgaacaagaactatcagatgacaccgagtgaacggggcgcgtttcaaaccgcgtttatgacttggtatgatgaaaatcgccgggacttgccttggcgccagaatcaagagccctatcgtgtctggctatctgaaatcatgctccagcaaacgcaggttcaaacagtgattccgtactatgaacggtttttggcgacttttccaacggtggcagacttagcggccgctccagaggacttattaatgaaaacgtgggagggacttggttattattcgcgcgcgcgtaacttacaaaaagcagcgcgccaagtcgtcgacgattacaatggtcagtggccaacaaccgcggctgaattagaaaagttagccgggattggaccgtacacagcgggcgctatcgccagtatttgttttggcgaagtcgtcccggcaatcgatggcaatgcttttcgggtgttcagtcggttattgaaaatcgatgctgatattgccaacccaaagaaccgccacattttttacgatgcgattttaccgctgattcccaaagatcgcccaggtgactttaaccaagccgtgatggattttggctcgcaagtttgtacggcaaagaatccaacggttggtgagacggcgttagcaccgtttttccggagttatcaagatggcaccttattggattatccagtcaagacgaagaaagcaaaacaaaaaccggttgcgatgtttgcagttgtgattcgctcgcaaaagggcttattatttcaaaaacgaccgagtaccggtttattagcgaacctgtccacttatccactagtcgctgcggaagacttgcaagtaactgacgatgaattattgacaccggaagaacaattagctcgtatcgaaacttattttaaagaggcttttgcactagaattgcagcaattacatgaatcaggtttaaaacctgtggtgcacgtttttacgcatcttaaatggacaattacccttttagaagcacaacttgcagcagatgccgacctcgcctttttcccaggccaatggtataccgaggcacaattagctgacgttgcattaccgactgtgcaaaagaagttagcggcacgtttggcaaccaattaatggtagaaagttttaggtaaatttgcgagtctttgctataatgatagatgattatgaataataaccttggaaagctgggtatgtcgatgagtattcccaaagaaggcgactatatagcgattcaaagttataaacacgatgggagtttacaccgcacttggcgcgatacgatggttttgaaaaccagcgagaacgcagtcattggttgtaacgatcataccttagttacagagtcagacggcagaaagtgggtcacgcgggagccggcacttatttatttccataagaagtattggtttaacgtggtggcaatgattcgtgagggcggcgtttcttattattgtaatttggcatcgccgcatgtcatggatcaagaggcgcttaagtatatcgattatgatttagatgtgaaggttttccccaatggcgaaaaacggcttctagatgtcgatgaatatgaagcgcacagtgcgcaatggcattattccgccgaaactgatcggattttaaaagccaacgttaaggttttggttgattggatcaacaatggcaaagggcccttttcgaaggaatacattgatatttggtataaccggtatcaagaattggcgcaccgtcgttagaacactatttagtctcaagcaaaaaagccccagtcattgattgactggagcttttttgtatgggttaatcgttttcgactgaagtatcttgttgaatcgttaatgttttaaagccgatgccagcaccgatgctgatggatagcaaaagcgcgaagacgcaccagccgagtaaactaccagcaatgatgttgagtggtaagaagtggcgtaacagataggttgcaaggcagaaaagaatgccatcaaaaatgaagttagcaatcttaataccaagtgaacgttctactaggaagaaacttgttaccattttaagtgtttggttaggggctaagtcagccataatcgtcaacggtcgttcgattggaactttaataaataacattagggtgctgctgattagagcactgaacaaggtgcgatcccaagtggcactgtgaatcacaagactgtcgtaagccgttgcggcaatcgtaatgacgagtagataagggataatgaagaaaaataagtggacaagaagtgatttttgcttaggcatggtaacgtcctttctgttattaagctgtgttcattataagtcatttagtggtgaaatgacaattagtcagttaattttttaaccatttcttgatgcataatcccggcatctaggaactgtggtttggcggttgcttgaaaattaagctgcgtatagaacggtactgcacttaattgagcatttaaagtgagcgttgctttgcctgattcccgagcaaaaacttcagcggcacgcatcagttcttgaccataaccatgatgccgtgctgaacggctaactgcgacacgttgaacatgataatctgagtccgcttcgatgagccgcaacgtcacaacggcttgatcagcaacgtagccgacaaaataaatcgcttggtcttcgaattcatcaatctcaagttcagcaggcacgtgttgttcaacaatgaatacggcttgccgaattgccaaactatcttgataaaccgtactttttaaatcacgagtttgtttcactaacattaaaaaaccacctcttcaaaaggaataatcaatgtgtatcactataaaatttggtacaataacaataatcgttacactatgatagcataaaatgcgttttgtgtgacataggcacactggggggatactgcatgtttgatcgtttacgccaatcaaaactattattttggtcaattgagcttttgattttggctgtgttaatctttgtttgcaccaaaattagtttcttatttgatccaattggcacctttatttcaactttatttgggccaattattggcgcgggactattattttacctgtttaacccgctaatcaatctgttaggtaaactcaaaatatcacgcaactgggcgattacgattatcttcatcgtcttttttggcggtttaattttcattgtagccactgtgattcctaacttgattaaacaaatcacacaacttgtgacgaacctaccagattttgctcatcgactgcaaaaagtagcggatgatttatctagcaatccgcgcttgaaaaacattgacttcaataaatacgtcaatcagttagatttaaaaccatcgaagattgctgaaaaagttatgaagagtttcacatctggttttggtagtatgattggtgcgattacgagcgttacagttagtgtcttcacgattccaattatgttgttctatatgttaaaagacggacaccgtttagtgcctaatattcaaaagatgttacctgatcgttataacgaccaagtggcggacttgcttcggaagatgggggcgacgatttcagcttatatcggtggtcaagctctagagtgtttattcgttggcgtctttacatttattggttatctcattatcgggatgccatacgcttatttgttaggatttattgctggcgtttctaacgtaattccatacttagggccttatattgggattgcgcccgcgttgattatcagtttatcaatttcgattcccaaaacaatcatggtgattgttgtcgtcattgttgttcaacaaatcgatgggaacttgatttatcctaacgtgattggccgttcattagatattcatccgctaaccatcatcattatcttattggtcgctgggaatatttatgggattttaggcatgattttagcgattccgttttatgctgttaccaagacagtgattacttatttatatgatattcaagcgttacggactaaagctaaaaaagggaccgacctttaaaagatgcaggttgaatttccatttttgactatgctatactgcaaggtaggccatattcggctaaatgtacttatttagataatgaaaggtagtggatgtgacgatgaatcctgaccctggaagttcggtgtggggacagttactgttgatattaattttgaccttagtgaatgctttttttgctgcggcagaaattgcacttgtgtcactaagtcgtgtgaagatggaggagcaagccaataaaggtgacaagaaggcgcgagtattagttcaagtcttaggtcattccaatcagtttttagcaacaattcaagttgcgattacgtttgcgggcttcttatcttcagcgagtgctgccacaaccattgcgggtagattagcaccccttttaggaaatgcggcttggacaaaggaagcggccgtattaattgtgacgattgtcttatcctatgtatccctggtttttggggaattatatcctaagcaagttgcactgcatcgtgcagaagcaattgctaaaataacggtgcaacccgtgcggatcgtcggtatcttactgcgaccattcgtgtggttgctatcaatgtcgacctcgctcttaatgaagttgacaccaattgatttttcagaaacagaaccgaagctcacccgagaagaaatggtccacatgattgaatctgggaagagtgccggtgttctggaaaccgatgaatacgaaatgttagaggggattattaccctcaataagaagatggcgcgcgaagtcatggtaccgcggactgatgcatttatgattgatatttgtgcagacaacgatcaaaacatcgatgccatcttagcccaaccattctcccgcattccggtttatcgggatgataaggatcaagtggtgggggtcgtgcatatcaagaatctcttgaaagaagcacgccaaaaaggttttcaggccatgcaaatcgaagcggtaatgaaagaacctctttttgttcccgaaacgattacaattgatgatttattatttgaaatgaaacgcacacagcaacaaatggcaattctgttggatgaatacggtggcgttgttggcttagccacgattgaagatttattggaagaaattgttggtgaaatcgatgatgaatctgataaagctgaagaattgtaccaaaaaattgatgcgcagcattacaccgttatgggaagtatgccaatcaatgaatttaacagtgccttcaatacagatattcaagtcactgatgtggatacaattgccgggttcgtgattactgaaattggtgccattccagtcagtggtcatccggaaacaattgagctgccaggtggcatgagcttaacgacggggtcggtttccggttcacggttgattgatttacaattaacgttaccagaaccagagaccgatgcaccagaagaagtcgactaaattaaatgagcacaatcaatgggacaaagggtgacgcaatggttgcgcaattctttgtcccaagcgcattatattggaataacggaaaggattttataatgacacctactgaattaaaaacggcggttgatcgtcgtcgtacttttgcaattatttctcatccggatgctggtaaaacaacgattacggaacaactcttacttttcgggggcgtgattcgtcaagccggaacagttaaagggaaaaagagtggccaatttgccaagtccgattggatggaaattgaaaagcaacgtgggatttccgttaccagttctgtgatgcaatttgattatgacgacaagcggattaatattttggatacaccgggacatgaagatttctcagaagatacgtatcggactttgatggctgttgatgcggcggtcatggtcattgattctgctaaagggattgaaccacagaccaagaaattattcaaagtctgcaaaatgcgggggattccgattttcaccttcatgaataagttggatcgcgatggtcgtgaaccacttgatttgattgctgaattggaagaactattggacatcgaaggctgtgctatgaactggccaatcgggatgggaaaagacctccgtggcctttatgatatcgccaaccgtcgaatcgaactttatcgaccagaagacgaagccaacccttatttggcccttgatgaagcaggtcggattgccggtgataatccattgaaagaagattctgtttacacacaagcccttgatgatatcgaattgatcggtgaagcaggcaatgcctatgatgctgataagattgcaacgggtgaacaaacaccaatcttctttggctctgctttgactaactttggggttaagacgttcttagaatcattcgttaacttagcgcctgccccagaagcacacaaaacacaagaagaaacgttggttgaaccaacctctcctgatttctcagggttcatcttcaagattcaagccaatatgaatccagctcatcgtgaccggattgcgttcgtacgaatttgttcgggtgaattccaacgcggaattgatgtcacattgacgcgaacaggcaagaagatgcggttgaacaattcaactgagttcatggccgacacacgggaacaagtgacaagcgctgttgctggcgatattgttggattatatgataccgggaatttccaaattggggatacgattcacacgggtaaagaggctgtttcatttgagaaactccctcaatttacccctgaattattcatgcgcgtcactgccaagaacgtgatgaaacaaaagtccttccataaagggattcaacagttggttcaagaaggggcgattcagttgtataagacttacacaactggcgattatatcttaggcgccgttggtcaattacaatttgaagtgttccaatatcggatgcaacacgaatataattctgaagtattgatggatccaatcggttcaagaactgcgcggtggatcaatccagaacaattggatgaacggatgtcatcctcacgaaatctattggtaaaagatattcatgacgaaccattgttcttatttgaaaatcaatttgcagaacgttggttccaagataagtatccagacgttgaattaaccgcaaaactataatataaagagtcaaacaaaaataagccgccgattcagacacactaactgttgtctgaatcggcggcttattttttttaggggggtatttagtcaaaagttaggaggccttccattaaccactgacctgttttaagttgacaccagcgactttgattatcgagtacaacgacttgcttaacgactacccgtgttttaggcactatctgatatgttgtgggttggtcatacggtgcttgccaaaatgttacggtattgttgttcagacttgcactgaggtttagaggggttgtttcgataactgcgtaatggtaggtgaactttggtacttggtatgattcatcactgcctttaggattagtggcatgtaattgataacgcgtaggggtaatccaagaactgccaagattgaaccattgtttgccagatggagcagttgcacagctataaatcttccaaaccgcgtgctttggcaagcgagcagcagtcagcgcttcttcacttggttgctgataggtatccgttggctcaagaagttcgatgaagggctgttcaggtgcatcgctgtgttttaaattcagcggatcatatttaaaatggacaaactgtgtcttagttgtaaagcgaccagtctgattagctgaggtgtggtgcacgaagttagcaccaccttctagtggattggcttgatagtgttcgttcaaagcacctgataaaaattggggcttaatcaacaagccaccttctaaattctggtgtaacaccattactggtgctgcgagttgcggtttataaaaaagccagatagtggtgttttcttcaggaaactgttgttttaaattggtaatagctgccaagtaataaccggcaaattttagccatggcaaattgagcacggtacccacttcacctgtcagggtcatcgttggtcgtaaagggacccgatgatgatcgaggtagtgaatggtaactgtgctatggcgcggttgtgtggacatcgtagccagcagtggcgttgcgtcctgactaacgggaacgaccggctgtttctgtgacgattgaggcgcttgacggatgggctcttgctcagagacagtttggcgtacatgactgttcggtagaggagctgcttttttcgggcgccatttcaataacgattgaagcaggttaatcagattcatacggactccttgtagcgcattacttattactactagtctatcataaattacaaaaagtgtggttgataattaacgcgtcaagtgggcataaaaaagaacccctgcaaaaatagcagtgattctaatcgtttaaatatctaatacttgtaatttagttgcagtatgggtgacgcggccgatggaaacgggaattaaggaaacgattaattctcctgtacgtgaaatgacggcgcgttctagatgcccaccaaaaacgcttgtatctaaacgggcaaagcttgcatgtagatggacatcaatcgtgccatttgcattttcgacattcccactaagggccagcagttctacttgctcttgactggaagtggcaatatattgatccgtttctggtgaataaacgctgacggtaacttcatcacaggcaccaatccccgtgatagttcccagttggttggggaaggttgcggccaaatatttaagttctgttaggatttcgtcgcccacttctaaccggcaaataatttggtgctctttttgaaaagtcttcatcgcgtcattaatcctcctaaattaggttgaaagttattatacgatacgacctattcaattgccattattttgcctatgtaaaaaaccgccccaacaaaatgaaatgtcggggcggttcgaatgattaactcactgtttttgaaggtgttggaattgtaatttcgactaatggaccatcattcaagacttcaaggccatctgtggaatctaaaccggcgagttccttcaatacaaaatcgatctcggcttgttggacatgtcgatgatcattttttaaaaggagctcacgttccttcgatgaacgcgagtcaagaaccgttgttttaccaagtgaataaaccttaacgtaggttgcggctgttgcagcgagttgttgtgaaacaagtcgcttataagaattggttacattgattaagcgcatctaaatcactccctggatgtttaagtcttaccactagtataactgaaaacgcttcatttggcacgtaattcgttttaacttgagataataaagccttttaatctgtgacctgtgactctttagcatcggtgatttgaatctgatcttccaccaaccgagccgtcaattgtttatgttctgggtgatcgagataatagtcagccacgcgatcttcaatttgttcttgaataacacgtcgtaatggacgcgcacccatctctggattgtaaccaagatcgacaagccgtgatttgactggttcagttacggcaatgtttaacccttggtcagcaatcatcgcatttgtttgatcgagcatcagactgacaatcttcaagagattttctttgcttaatggttggaactcgatgatatcatcaaaccggtttaaaaattcaggtttaaagtagttttgtagttggtttaaaatcgagtgtgtctgaccagaaagggttgccccgaaaccaacattggcttcggcatcagtttggccggcatttgaagtcatgatgatgatggtgtctttgaagctgaccgtccgtccttgtgaatccgtcagacgaccatcgtctaagatttgtaggaacatatgcatgacgtctggatgtgctttttcaacttcatccagtaagatcaagctgtatgggttgcgccgaacttgttcggttaattgacccgcttcttcatagccaacatagccaggaggtgatccaatcaattttgacacactgaatttctccatatattcgctcatatcaaaacgaatcatagcatctgtgctaccgaaaagttctttggcgatttgttttgctaattcagttttcccgaccccggttggtccaacgaataggaaagaaccgattggtcgaccggatttgttgaaaccaattcggttgcgacgaatggaacgggcaaccttatcgactgctgaatcttgaccaattacgtgcgcttcaagattttcagcaaggttcttcaactgtgcttgttcttgtgcctttaactcaccaactggaatgtgggttttttcttcaacgattttttccatatctttgtcggtgacggttggcatttcagattggtcaatggcacttgtttcgcgcatcttggtcaattttgtgacttgatcgcggtaataagcggccttttcgtaatcctcgtcctttaacgcactttgcttttcagcttccgcattttgtaatttcttttcgatttcttttggatcgacaacggtaatcgtcaagttcttcttagagccggtttcatcaagtaagtcgatggccttatctggtaagaaacgatcctggatataacgattagaaagggttgcagccgccttaagtgcctcgtctgtgtagtggacttggtgataggcttcgtatttatcttggagtccttttagaatttggactgtttcgtcaacagaaggttcattgactgaaacgggttggagacgacgggcgagggccgcgtctttttcaatttgtcggaattcattattcgttgtggcccctactagttggagttcaccacgggcgagggcgggttttaacacgttaccggcgtccatgccaccttcggcattaccggcgcccacaatttcatgaatttcatcaatgaagagaatgtattgcttattctgcttcaattcagtcatcagttgttgcatccgttgttcgaattgaccacgaataccggtcccttgaacaagtgaaacaacatctaagcgaatgacttgtttatccttaagtttggcaggaacgtcatcgtcggcaattttttgagctaagccttcgacaacggcggttttaccgaccccagcttcaccaattaatacgggattgttttttgtccgacggtttagaatttcaataacacgatcgatttcagcatcgcgaccgatcactggatcaatttggccagctttagctaagttggttaggtttacaccgtattgactgagcagactttcgccgttttgcccgttgttgccgccaccttggccgccactttgggtttgtggcccttggtttgcttgtgattgatcatcgggagttgcgcccattgctcggaagaaactatccaggcttccaaagccaaatggatctgcatattgcccttgtggtgcttggccattactgttttgttgtttcaagagttggtaacagttttgacaaagatcgatttcttgtcgttgaccattggtgcttgtatagagatgaatcgttgcaggattcttctggcagttttgacaaagcattaatctgtcacaacctttcattaataatagaatcgtcaaagtgttcttgactatctttgacctttatccaaattataatcatctctaaaaaaagttgcaagtcaggcaactcgaaaataaaagtttcttgtcaggtatgggcggtatgcggtagtatgaggtcatcgttttatttcgcagatggaatgaaaacgaatttttcaagccacgataaaagaattgcaaaggaggcagaatggcagatgcgtgattttttagcagagatggatgccttaataaataacgaacaaactgagattgaggttgctcagtccgaatttttagattttcagaaagtatgggtcaactatgaccatcgaaaagaaattgtgggcgaagcacaacgaaatggtgcggtaatctaccgcaagtctgaaagcggtatagtgtagacggctactaattttgttagcgaaactattgtagtattttaaaaaaaatggtaatcttaaatatcggaagggtagccactactagtgaccactcatttcgttaaaaactaaatctataattagataaaaggggatcgattaatatggaaaaacgcgattttcacgtagtagcagacacaggtatccacgcacgtccagctacattattagtacaaacagcaagcaaatttaactcagatgttaacttagaatacaaaggtaaatctgtaaacttgaagtcaatcatgggtgttatgtcactcggtgttggccaaggtgctgacgttactatctcagctgaaggtgctgacgaagcagacgcaatcaacgcaattgaagaaacaatgaaaaaggaaggtttatctgaataatgacaaaactaagagggattgctgccagtgatggtatcgctacggcgaaagcctatatgttagtgcaacccgatttgtcattttcgaaatcaactatttcagattcagaaaaagagattaatcgtttgcataatgccttacaagcttccacgagtgatctagagaccattcggaagattgctgctggatcactaggggaagaagaagcacaagtttttgatgcccacatgatgattttagcagacccagaatttaccggcgctatcgaaggtaaaatcaatgatgacaaggttaatgctgagcaagcgctcaaagagatcgcggatttattcgtggccacttttgaggctatgactgataacgcatacatgcaagaacgcgctgctgacatcaaggatgttactaagcgagttctcagtcatttattaggggtaacactccctaacccagcgttaattgatgaagaagtaattgtgattgctcatgacttgacaccaagtgacacagcccaattaaacggtaaattcgttaaggcttttgtgactgatattggtggtcggacttctcactctgctattatggctcgttctttagaaattcctgcaattgttgggactgaaaatatcacaacttctgttaaagccggcgaacaattaattgtcgacgggattaacggggatgttattatcaatcctacagatgcagacattgctgaatacgataagaaggcgcaagctttcgctgatcaaaaagcagaatgggaaaagttaaagaatgaaaaatccgttacaaaagacggaaaaacattcacagttgctgcaaatatcgggacacctaaagatttagatggtgttatcgataacggtgctgaagcaatcggcttataccggacagaattcttatacatggactcatctgaattacctagtgaagatgatcagttcgaagcttataagactgttttggaaggtatggctggtaaaccagttgttgtgcggacaatggacattggtggggataagaaattaccttacttgccattacccgaagaaatgaatccattcttaggctaccgtgctgtgcggattagtttagatcgtgatgatattttcagaacacaattgcgtgctttactccgtgcttcaaactacggtaagttacgtatcatgttcccaatgatcgcaactatcgcagaattccgtcaagcaaaaggcattcttgaagaagaaaaagctaaattaattgctgatggtcaaactgtttctgatgatttacaagttgggatgatggttgaaattccagccagcgccgtcttggcaaatcaattcgctaaggaagttgacttctttagtatcggaacaaacgacttgattcaatacacaatggctgctgatcggatgaatgaacgtgtatcatacctttatcaaccatacaatccagcaatcttacgtttaattaagaacgttattgacgcttctcataaagaaggtaagtggactggaatgtgtggggaagccgctggcgattcagtcatggcaccactccttgttggaatgggcttagatgaattttcaatgagcgcaacttcggtccttcgggttcggagcttgatgaaacgtttagatacaactcaattaactgatttagttgaaaccgctgttaatgtgaatataagtaatgaagaaaaccaaaaattagttgaagattttatgcaaaatctttaattaaatggtaaaagaccgcccactgtggcggtctttttttgtgcgtaaaatgtggatgagcaaaaaagattgacagttatcgattacaaatgtaaactgtaactaatgattacaaatgtaaacgaaagggagaaaaccgcgaatgactgaaaaaataggggttattacggatgccgaatgggaaattatgcggatggtttggtcacttgggcaagtcaacagcagtcatttaattgaactcgttcagcaaaagcgtgattggcaagcgtcgactgttaagactttggtaggtcggttggttaaaaaagactatttaattgccactaaagaagggcgccgatttatatatacggccaatatcgcagaagatgaagcgatgaaccatgccacgcagtcgctgtttaaccaattgtgtgggatgaaaaaaggccgcacattagccactttaattgagcaaacaacgctcagtcaagatgatattcagacgttacaaacggtgttagcggctaaattacctagtgcaccaacaatgattgaatgtgattgtttaccagccaattgtgattgcatagaggaggaagtaaaatgaaacacgatgaaatgcaccacgaacatgaaggacatgatatgaaagagatgcagcatgaacatcagatggaccacagcatgcacgacatgcatcatgaccacgagatgatggatcatgatatggggcatatgaatcacgatatgcatgggatgcaccatgacatgggcgacggcgatatgatgatgcatggtggtcatatgatgcacatgggaaatctgaaacaaaaattctggatttcattaattgcaacggtaccaattctaattctctcaccatttatgggcatgcagttaccttttcaaacgactttcccaggttcagattggctagtattgattttagcaacatttctcttcttttacggtggggcaccgtttttaaagggcgctcaaggagaattatctgctaagagcccagcgatgatgaccttaattgcaatggggatcagtgtttcttatctatatagtttatacgcctttgttgcgaaccatttcttgaacccacaaggccacgtgatggactttttctgggagcttgcaacgttaatcgtcattatgttgttgggacactggattgaaatgaatgcggtaatgagtgcagggagtgctttagaaaaaatggctgctttgttacccggccaagcacaagtaattgatcaagcagggcatcaacacgcggttgatttaaaggacttgaaaaaaggacaaactgtattagtcgcagctggtgaaaaagtacccgcggatgggttaattatcgccggtcaaagccaagtcaatgaatccttagtgacaggtgaatcaaaggctgttgtgaaggctgaaggcgatcaagtaatcggtgggacagtcaatggaaatgggacgttaaccgtgcaagtgaccgggactggcgaaagtggttacttagcgcaagtcatgaaattaattaaacaagcacaacaagaaaaatcaaaagttgaagggttagcagataaagttgcgaagtatcttttctatgctgcattggttgctgggattatcgccttcattagttgggtgttcttggccgatctgaatacggcttttgaacggatggtaaccgtctttattattgcttgtccgcatgcacttggattggccattccattggtggttgccagaagtacagcgattgcggctacaaacggcttgctcattcgtaaccgtgaagcaatcgaattgtcagataaggttaccgttgttttgatggataagacggggactttgacacaaggtgcattcaaagtgaatgctgtcgaagttttcgatacagcacttgatgaacaacgactcatgcaattctttggtgcgttagaacgccattcaagtcatccattggccactgggattctagagtataaccaagcacaaactattcctgatttacaggcagacaatgttcaaacgattcaaggcgtcggtttgtctggaacggttgcagggcaaagttatcaaatagtgacggcaacttatttacaagcccagcatattaaatttgatcaagctcttttccaaactttagcagaaaaagggaattccatcagttatctattacaagatcaaacggttttaggactagtcgcacaaggtgatcagattaaaccagaagcgccagctttcatccaagcattaaagaaacggcatatccaaccggtcatgttaaccggtgataatcaacaagttgccgaaaaagtggctgcacaattgggcggtatgacggttcaagcgaacttgaaaccagaagataaagaagcaattgtcaaagattaccaagctaaaggcgaagtcgtcctgatggttggggatggtgttaatgatgcaccaggtttaacgcgggctgatatcggaatcgcaattggtgctgggacggatgttgcaatcgattcagcagatgtgatcctcgtgaagagtaatccaaacgatattatgcatttcttgaatttatcgcacgcaactaaccgcaaaatgacgcaaaatctctggtggggcgctggttataatattttagcgattccattagctggggggctatttgccggaattgggttagtattaagtccagcagttggtgcaatcttaatgtcactctcaacaattgttgtggctattaatgcaatgactttgaaattaaaacgagatgcatgatgtcaatctttttttaagcagtatgaagtagatttcgataaggacgggcgaaagaaaatatcgcacacaattagacgcacacaacatatagttgtagtgcgtctttttgttggtttatctactatatataggttgaatctgaatttttaatccgctatgatggggttactgattcaaaaggagactggtgctaagatggatatgaaaattgcttcagaagcagacttgcaaattaaagtgattaaaagagatgggcgaatcatgcctttttctgcggataaaatcgaacaagcaattattaaagccgctaaaaatgtgaagacggaattagagccattagactatcaagtgttaaacacagtcgcactagatgttgtgagtgaagtcggcagccgatttgataaagatgttaaaatctatgaactgcaaaatattgtggaacataaacttttagaacatcaccaatatgatattgcccaagaatacattaactaccggacgcaacgggactttgcccggaataaggcaactgatatcaactttaccattcaaaaattattgaaaaaagaccaaactgtggtcaatgaaaatgcgaataaagatagtcatgtttttaatacacagcgggacctaacggcagggacagttgctaaagcgatggggcttaagatgttgcctgataaagtggcgaacgcccatttaaaaggcgagattcattggcacgatttggattaccaaccatatagtccaatgaccaattgttgtttaatcgattttaaagaaatgttgaatcatggctttaagattgggaatgccgaagttgaagcgccacattcgattcaaactgctacggcacaaatgtcacaaattattgctaacgttgcttctagtcaatatggtggttgttccgctgatcgggtggatgaattattggcaccatttgccgaaaagaattatgccaaacatttagcagatgccaagaattggattgatggcgaagcaaaacaaaaggattatgcgcaaaccaagactgaaaaagatatttatgacgccatgcaagcgttggaatatgaaatcaatactttatattcatcccaaggccaaacaccatttacaacgcttggttttggattaggcagtaactggattgaacgtgcgattcaaaaagcaattctttcaattcgaattgaaggattaggtaaagaaaaacggactgccatcttccctaaattagtttttgcagtaaaacgcggcttaaacttaaatccaactgatccaaattatgacatcaaacaattagctgttgaatgtgccacaaaacggatgtatcccgatgttttaatgtatgacaagttggtggaattaacgggttctttcaaagcaccaatgggttgtcgaagcttcttacaaggctggaaaaacgaacatggtgaagaagtgaatagtggccggatgaatctcggcgtggtgacaatcaatttaccacggattgcacttgaagctgatggcaaccaagctaagttctgggaaattctagaacaacggttgcaagtctgcaaggaagccctggtctttaaagtggaacgcgctaaagaagcgaagccagaaaatgcgccgattctttatgaatatggtgcctttggcaagcgtttgaagaaaaccgatagtgttgatgaagtctttaaaaattcacgcgcaactgtttcattgggctatattggcctttatgaagtcggtacagccttctttgggccagactgggaaaaggatgccaaggcaaaagcctttacggtagacgtcgttaaagacctctataatcactgcgttgattgggaaaaggaatacggctatcacttctctgtttacagcacaccagcagaaagtttaacaaatacgttctgtcaaaaagatacgcaaaaatttggcattgtcgaaaatattacagacaaagaatactacacaaatagtttccactacgatgtgcgtaaagcaccaaccccatttgaaaaattagattttgaaaaagattatccaaaatactgttctggtgggttcattcattactgtgaatacccaaatctgcgtcaaaatccaaaggctttagaagctgtctgggattatgcttacgatcgtgtcggctacttaggcacgaatacgccaattgatcaatgctttaaatgtgggtttaaaggggactttaagccgacagaacgcgggttccaatgcccacaatgtgggaacacggatgctgctacatgtgacgtcgttaagcggacttgtggttatctaggcaatccacaacaacgtccaatggtgcatggtcggcataaggaaatcgccagtcgagttaagcacatgcatattaccattggcaacgataataacaacgttgcacggcagtaattgtgaatacgggatttgaaggagtttttgaagatggcagtaaaacaacaaggcccgaagaatccggcgcccaaagaatggctttctgaaacactaagccaggattatattgcagattataaaccgtttaactttgttgatggcgaaggggtgcgctgtagcctatatgtgagtggttgcatgtttgcttgccccggttgttacaatcgagtggcgcagaattttcgctatggccgcccttatacaactgaattagaagaccaaattattgctgatttagggcaatcttatgtccaaggactgacgttattaggtggcgaaccgttcttgaataccaagacttgtttatcgctagtagaccgaattcgcgccacttatgggcagacaaaagacgtctggtcatggacgggatatacgtgggaagaactgatgcaagaatcagatgataaactcgagttgctgtctaagattgatatcttagttgatgggcgcttcatgaaggaccaaatggatttgacattgcaattcagagggagtgccaatcaacggattatcgatgtcaaaaaatcattagccgctaaaaagcccgttatatgggcaaagcttgttcattgaaagtaatatgtaaaataaagttattaaaaatttaattttcattttccgtcattggtatatacctaacacggataaaaaagagcgtcaatccatgattagaatgggttggcgctttttttagtttttgtgaaaaactggacattcataggtaatgaacggggttatcgtttgacaacgctttctgtaacataatacttgtaatagcaattattttttaattatgattcaggaaaaggagtgaggttaatggattcatttatcagtttcatggagaaacgctttttaccagttgtggcaaaagttgggaatcaacgacatttgccattcgtgatgccttcgtaacaacgatgccattgatgatcttgggggcttttgcaaccttgattaataatttaccaattccggcatataccaatttcatggatagtgtgttctcaaagacagttggtaagggcgctgaaaaggcttatatctggactaaattcgggggcaatgcttggagcgggatatttgcgattctttctgtgtttatcgtcttcctagttgcttacaatttaggtaagtcatataatatcaatccactagcagccggcgtaacagcattagggtcattctttgctgctggcggtcttgcagggatggactcaatgggcttgttcgttgctttaatcgttgcgatgatttcaacagaaattctcagacgtttattgggtaataaacacttagtcattaagatgcctgatggggtaccacctgcagtttcacaatcattcgcggcattattgccatcaatgattaccatcgcagtcttctcattatttgcaacaattctattaggctttggtgttgaaaatattgtgacatcattctacaaagccgtccaagaaccattccaaggacttgcaaacagctatccttcagcattattattagcattcatcacaccattcttatggttcttcgggttacacggtgctaacatgatcgaaccattcatgcaaacaatcaatgcacctgcaattacagctaacttaaatgcgattaaagctggtaaagcagcaccatatattgttaacaaaccattctttgattcatttgttaacttaggtgggactggtgctactttaggcttaatcattgcaatctggttagtgggtcgaaagaataaacaatattcaatcgttgggaatttgagtgccgctcctggggtcttcaatattaacgaaccattaacatttggcttgcaatcgtattgaacccaattttattcatcccatatattgccacaccaatggtgatcgttacaattgcatactttgcaactagcaccgggttagtgcccgctgcaacggttatgccaccttgggtaacaccaccaattatcggtggggtcatcgcaacggttagttggcaaggtggggtattagcagcagtgaacttacttgtttcagtgctcatttacctaccattcatcaagatcgccacagacatggctttaaaagaagaagcagcccgcgatcaagcggcttaagcacaaaaaaaggtccgacattcatgtcggaccttttttttgtgcctataattaatgagttgactcacttgcaatggtgacgtgcccgttttgaacgctaccaatgacgatattgttcgaaatctggtcagcggttgcatcggttagatagttgacactatcactcatcccgacaacagcgggacctgctttgaccgtaatggttgaagctgattcaccaggcttttgttgatcaagttgctcaaaaatggtttgatcagtctgtgataaatcggcagtagctactagtgaatccgtcttttgatagcttgttacttgaccagcaccgatgcgtagcagttcatgatcattcatgaagaggtagagataaccgatactatcaccactagcaatcgacttaggggttaattgataaccagcttgtgctgcatcccttttttgagcagcatagattgtattttgattgagcgttactaaagtgtatttggcaagatcttgaatggcagagcgttcaatactatcataacgtttttggtacatgaagccatctttgaccatcagttttccggtgtcattagcactcgtcgttgttgcggccgcaatccaagtgccattgagttggtcgagggcaacaggactggcggttgttttggcggttgctttttgactgacgaataactgtccgcggtcaaaattggtgggttcttgtatatctctgtaatgagctgtaattgcgtatagatgatttcctttggcaacgaatccttggtcaattgtatttttcccagtcttagtctcaagaaagacgagatctgagaggtgtttaatcttaaagtcagcccccaatttgtgtaatgcagcgttgacttgtgccacagtcatcagatggagtgtcttttgatagctcttcatcagatgactgcggctatcttgttgccattttttaaacgaaatttgttgataattaatcggctgacttgtgaaggtgcctttagaggtcagccaacttttaggagtggtcatttgagcaatatttgaaacggtgatgtcatcagaaagaccgtttttagtttgcttagaaaggagttgtttgttaaacaaccaagtctgtgaatcggtcgcgagggcttttttagttgttttccggttggcgtaggtcgtcgtagttggctgcgcgcgggatgtggttgatgaagccggttttttagcttggcaacctgctaggagtgttattgttaaaagggtagtgattaaaagtgttttacgcattttgaagctccgtttcatttgtctgcaggatgggttttgccgaataagccgtcatcgtcatccgtgttgtagtaacttaaaaaaggaaagagtaatttaaaagtggaaccactgccttgttgggagctaacggtgagttcgtgaccgagcttttcacttaaggcacgtgcaagatagagccctaaaccggttgaacgttggttagaatagcgcccattttgaccggtgaaccctttatcaaaaattcggggtaggtcttcagccggaatcccaatccctgtatcgatgacacttaaccaaacgccttgttcgtcacgttcaatctgaaccgtaatttgtgcgccatctggggtatactttaacgcattggaaatgatttgattcaaaataaaagccagccatttagcatcggttaagacggtttgatcggcaccaagcagtttaaattggatgtgtttttgaataaaataattgcgattttggcggatgatttggttgactaaaggtttcaaatcgtattcctgcaccaagtaatccttagaaaaactatcgagacgcgagtagtagagcacttgttcaacgtagtgttcaatttgaatcagttcatcggttaattgattgaatttgtcttctggaatctggtcttcgatggattcaatgagcaattgagtagctgccagggggaccttgctttcgtgcacccagccatcaatgaaattcttttgatcttgttgcgctgagattagtcggtcgatgctttgttgatgataggctagcagttgattcacgtagtgttgaatgaattgtttttcagccgaggtagcgcctgtaagtggccagttgaggctatcttctttagcatctaagcgtgtttggattgtgcggtaccacttgagatggtagacgtataagccaaccaaaaaggcgcagaaaaaaagcgccagcaataaatcgaggtataaaagtgtcgccttagcaaagcgcatactagggtcgagccataggacgatatccagaacaatcataccgctgaagaaaaaagcgatatgaaataaatgatcacgtaagaattttttaaacgtcataataactccttaggggatgatatagccttggccaattttcgtctgaatgtagtcttctaaaccagcactttcaatttttttgcgaagccgattgatgttaacggttagtgtgttgtcgtcgacaaaccgttcatcgtcccagagggcacgcaataacttttcgcgactgacaatctggccgtgttgacgcatcagaaattggaggagcttatattcgtttttggaaagatcaatggtagtctcacccacctgagctccgccgctttggaggttaatcattaggccgttatgttcgatgatatcggcattttggtcgacgtagttgtaagtccgtcgtaagagggcgttaattttggcaattaaaacttccatcgaaaaaggtttattgacgaagtcatcgccgcccatgttcatcgacatcaccatgtccatgttggtactgcgactagaaatgaaaattatggggactttagatacttcacgaattttgcgacaccagtagaacccgtcataaacgggcaggttgatatcgagtaaaatcagatggggtttattggttaaaaattggtcgaaaatggtatcgaaatcggtcgtaatatttgcgtgtaattgccacttatttaagttctcagcgattaagttggcaatcgttggatcgtcttcaacaatcataatttcaaacataatgaattctcctcatacatagatagactaatactaaccactttcactagaaaagacaaccaactaaggtcgtagttataaaatgggcttttgcggtcaactctgctaaaatgaataccaattagttaagggatgtgaaaaaatggcagtcgtatcagtccaacaagtttcgaaagtctacgggcatcggtttagtctggtcaatgcgcttaataatatttcatttgatattgaaccgtgggagtttgtcggtattatgggcccttcaggcgctgggaaaacgaccttattaaatatgattgcgaccattgatcggccgacgcatggtcaagtgttaattaaagatcaagttgtgagtcggatgcgggaagctaagcttgctaattttaggcggcaagatttgggctttatttttcaagattttaacttactagattcactgacggttcgcgaaaacatgttactgccattagcgcttgataagttaagtgtgccagtgattgaaaaacggttggataaagttagccgagtcttgggcattagtagtttgttggatcgttatccggatgaagtttcaattggacagcgccaacgagtggcatgtgggcgcgcaatgattaccaatcccactttgttattggccgacgaaccaactggaagtttagattcaaaatcagctacggagcttttacaatatttaaccgtgattaatcgtcaggaaaagacgacaattttattggtcacgcatgatgcctttacagctagttactgtcggcgaattcttttcattaaagatggtcaattattctcggaaatcgttcgcaatggtgatcggcaacaattcttcaatcaaattattgatatgcaagcaaccataggtggaggaggccgtttcaatgctgttacacctaaccgttagaaatgcgattaatcatgcgcgcgactatgcggcttatgtgattgcctgtgttgccgcgattgtggtttatttctgctttacgtcgattcaaactgcgccaatctttaggcacctcaagatggctggtgaatctttagcttttggccggatgatccaagtagcaggtttaattattttgctgtttgccgcttttttcttggcatatgctaatttatttttcattaaaaggcgtcggcgggagattggtgttttaagtgtcatcggggtgactaaatttcagattagcttactcttcttctttgaaagtttgattatcggtgtgattgccctgattatcgggttgttattcgggattcttttttcgaaattattcgcgatgttattattacgcatgatggggattgcggttgccatgccgtttttaatatcatggcgggccattgaacaaacgacattcacctttggcgggttgttcctattaactggttttttaaacagtacgatgatttatcggtatcaattagtgacattgctgcaaccatctgcagtcagtcggaaagtgcgccgaccgaactggctgacttatttatgggggattattgcacctgtattgattatcagcggctattatttggcagaccaaacactggttttgatgccgagcttagagcggcgctatggttttgggattgatttggtttatttactaaccattttattacttgaaatttttggcacactggctttttttcaggcctatacgcaaatttggctacagttagaacggcactggaaacggctttattatcgtgggacacatttgttaaacgttacgaatttgagttttcgttttaaaaagaatgcaaagatgttgtggatgattacgattttaagtgcagtcactattaccgcaatcggaagtgcggcgatgatttatacgcacggtcaagatacattacggcagaacattccggtggatttggtttatacacaaagtcaaaaagcagcggtcgacaaaattttaacgcaatatcatgttcagccggttagtcaaacaatgtcttcgtttaaattggtggatgctcgatttaaggtcaattcaccgttaaatcgggaaggcatcaaaatggatggagcagctgttgtcatgccattatcccaatacaaccaagtaatggcgcaacaatttaagttaccagcaactaaattgaagaaaaatactgtggtgaccatcattaacttgccattaacaatgctgaagatgcctcgcagagcaggtgcaggtttgccaccgaaaagagctggaatcccgttgcaattaaaacagtctgggctttcagattttcggattgtacacattcgtaagctatttccaaacggttctgatgtcttctttgatggtaacttaaacgtgattgtggccaatgatgctgaatatcaacaagtccaagcaacttcagttgatcaaatctatgcagttcagctctccgctgcccaacaaaagcaaaaacgattaatgcgcgatttattccgtctatctcaaaagcccaaacaatgggattatttaatgacgcacaaaaaagccgggcaaacccattatgaaattaaaaccactgatcaacggctagaagagttaagccgctattctgtgcttttaaaaaaacctaaccgagatattgctaacgcaaacttcggattttatatgtatgtcgccatttttattgggttaatcttcatgttagccactggtagtatcatcatgttgaaacaattgtcagaagcacaagaagagattttgcagtataaaacattgaaaaaaattgggatgagtgacggtgagattaagcgcacgatttatttccaaattttgatgctctttttactgccaattattttgggatcgatgcacgccttctttgcaattcggttattgggtttgtttttagataatcctgggttacaattagcctatatcgtttgcggcctgtttatcatcatttactttgttttctatctaattacggccaatatctacaatcgaattgtgaatgcaccgctcaatagtgatgtgttctactaaactcggagggaaagtttttgcaattagctatgtaccgcgcaaaagcgcgtcaattattaaaaggaaactggcagaaaatggccgctttagtcgcgctttggttgttagttgagatagtagtcgactcaatgattgaaggcgtgtttggcgccagttcatttggttatcaaatgctcaacacctttgccaattatttcttatactttatctttttaaatgctgttttcttaggtgtttataaagttagccagaataagcccagctattaccgggataccttattgttattccggcaaccgttgtatacccatcttgtggtattgaatcttgttcaacaagtgttaaactggatcttactattaattgggttggcgccgttttatcggttactcggttgggatcgtgtatttcaattcacttttaatggattagattccgttgcgccttatttgctaaacattagccagcaggggacaatttctgaaactgtcttattgtttgtgacggtgatgttggttttgtcactgttgcaacccgtgattttaacgtattatcagattttagtactgttgaagtttgatttaccacaagcaccactcaaattaatctttagcctttcatgggtgattttaaaagggaactggctgaaattactcgggcttactttatcatttattggatgggaactggtcgtctatatgactgctggactaggtctcttgtggttctatccatacttaattatgagcgttacgattttctatcaagaagttaaagctaagaaagtccaagtcattcaatagcattagggccgtcatccatttgggtggcggtctttttttatttagttagtaaatatagtgcgcgcgatacccggaatgcgctactatagaaattagaaaggtggtcatttaaaaatgcaattaacagtcttaggttattacggtggatatccatacgccggtgttgggactagtagttatttattaacaagtggggcgtatcatttattgctagattgtgggagtggcgctttattagcgcttgagaaacaacttgacccattgcaactagatgtggtccttctcacgcactatcatcacgatcacattgctgatgtgggggttttacaatattattggcaactgcatcaaggaaccaaaaaggaacccattttacctatttacgggcatctgcaagatccactccactttggcagtttgacacaaccgggtgtgacgcagggctttggttatcaagaagacacagagctgaccctggggccgttgaaagtaactttcaaacggacagtgcatcctgtcccagcattcgctgttcgaattgaagaacaaacgacggggcaggtcttggtctttactgcagatacggcgtatttcccagaattagctgctttttgtcagtctgcagatttactgatgactgatacgaattttcttgaagatcgcactggtaaaatggcgcatatgacaacaacgcaatccggtaacttggcacaagaaagtggcgcagctaaaattctattaacgcatttaccacaaggggtttcggcagaaacgctacaggcacaagcacaagcgactgttggggacgtacccgtgatagttgcccaacaggatttgacaattgatgtcggagcgtgtaatataggcggcgttgatggaacttacaaaaaataagtgaattttcattagaaagtagaaactactataattttttttgaatgataaatataaatgtaaaaacataaaaattaatggtgagtgggaaaatttaacaataaaccgttttaattagacgttttatgtccaaatgtctatttattaattattaaaaaataattaataaatttaattttagggtagttttctagtgctgactcgcgtataataaaatttgtaagagagaaaatgattgtcttattgttaagtaaggtgtcatgttaataaaggagagagacatatggttacgttatatacatcaccaagttgtacatcttgtcgtaaagcccgggcgtggttagaagaacacaatattccataccaagaacgcaatatcttttcggagcctctcaataaaaatgaaattaaaacaatcttacgcatgaccgaagatggcacggaagaaattatctcaacgcgttctaaggttttccaagaattaaacattaaaattgatgacttatcaatcaacgaattattagatttagttcaaaagaacccagggctattacgtcgtccaattattttggatgaaaaacgacttcaggttggttataacgaagatgaaattcgtcgtttcttaccacgtgaagtacgggcattggaattacaacaagcacaattactagcaggattctagaggagagtcggggctgttaacagcctcgacttttttgatgggttaaaaaattaattgctgcgatgtagatacttgaatgttacgccagatactggtatggtaggtcaaagaaagtgaattacgacgctataagaagcgcgttagaaaggggcgttgtcccatgagaatggaaaaaatcgacgagaacacaattcgggttctattagaaaatgatgatttagaagaacgcgggattactggacttgatttgttgagcaatcataaaaagattgagcggttcttctattcaattctggaagaagtggacagtgaacacacatttgcgaacaacgatgcagtaacgttccaagtgttgcctaacgatcaagggttagaattactgattagtaagaatatgccaaactttgacggtggtaaaggtcaatcagaaatggtgcaaggcaaagacggtattactgaatacattaaagaacaactgttgaaacgagatacggtccaagatgatgcgactgaggaagaggatgaaatgaccgcttatatgaatcaagcggacaatccaatgaaacagattgtgttatcgtttaagtcatttgacgattggattgctttggcacaacagctacacatcgaaagtggtgtgtcgaacctatttctttacaaacatcagtactatgcacagattattatttttatggagaatacgaccgaagcgtttgcacgggatgatttagcggtcgctaatgaatacgggcagaagtcagaatacacagcagcttttttaagtgaattcggtgaaaaagtcatggataatagtgcgcttgagttaacacgctactacttcaaacattaaaaataacgggttttcctaaatttaggagaacccgttatttttttgcgtattttcggtgggggtgataaataatgaaagttgcacagaccactaacgggtgcttaattcgcgccgatcaagcagccaaacaacagcaagtagcgcggtatttctgtccacattgtcaacaactggttcagttgcatcgtggggtgcataaagcaccatatttcgcacatatcgcagaacgtgtatctggtggtggtgagagtccagcccatctggcgggaaaacaggcgattgctgaattagcacatgcgttgggctggcatgctacctttgaagtacctgtcggcgagacacagcgcgctgatgtatggttaacgcggaatcagcaaccattaattattgaataccaatgcagcccattgacgccagataagttaaaccaacgaacaatcggctatcagcagcgccgattacctgtattatgggtggttggtgaacggtattgttttactaaccattatttaagccagcaacagttggggtttatcaactatcggcggcagtggggcttttatgtggtaagttatttgccaaagtgggggcaatgggtgttatatcaccatattgtcgcccgtgattttgctggttatgcttggcaaaccctgcgattgacaactaaggcgtttgtgcgcttgcttgtagcacaaacaagactgccagccaatcattataagggcaagtcacagcctatgcagcaacaaattattgaccgtcgattagggctgcaagacgcacattatgttgcgttacaggcggattgttatgcccaccatgaacgcttgcaagccgttccggactggtgttactgcacacgtaatgtaccacccatttatcagctcagtcagtttgaaagtcgggtaacgtggtggttgagtgcccaaccaattgatctttttttagcggtaacgcccttactccaacaaccactactaaagcaatccttatttgcacaatgggggcaaatagctttgaaacaagcattaaaaaagaaccgggggtcggttgaccaccggttctaagattaagaaataacatgcaaagcaacccgtgagagggtgcttttttgtttttgaagtgcttggaaagtctgttcaggtgttgtttcagcacaacaggcttgtttcaagagttcataggaatcgcaattttcaatcaataagcctgattcgctttcaccttttgaatagttgaagactactgctgaaggggtcatctgaatgttcatctcacaagataattgttgatctgaatcaaatgcctgtttagtaagtggattgtgccaatcttcaagtaacatttcggtatcaagtcctacgcgtttagcaattgtaaggactaattcgttgttaagttccatatctggttcacggaatgcttgttgcagttgcattaaaaatgattggctcttcttgcccccctggaacgttgctgccttataagcgagtactgcttcataaatggtgctgaaaacgtgattacgtaagtttaaatcatgactattttgttgctgaaactgcatgtaatgctcgacgttttttaagtttaagactggaataaacttaaaatgaatatttgcatcggtttcgccgataatctttaaaagtgcctcttcggaacgtaaacaaagttgcccgattgggttgataaataaaaacacttctaacaagttggttcctccaaactttctatattgtatatactgctcgacgcgcttgtactgtctactctaacaaaattttaaaattatgcaataagttagcttgacaaagtttaagcttgatggataagggcgcgcataattttattgggtggtatttgttcacttaattgatagcgggtgacaaatgatttaaaccaagttgccccttcttggacgttggtgacttcaatttcgacttcataatcctgggtttcgtcagggtattgggtaacatcaagcgttaacaggccagcaactaaagacgcggtctggcggtgcgttgttgcctgtccccagatgaacaattctttgataatcacggcttgtgctgcaaaatagacagcgatctgaccagacgataatacggtttggtgctcaattaagtgagtagcctgctcaagtgttaggcgatcagtgatttcaatcagactatgagcattttctacggttggcacctttagcgtctgttcggcataggtgtcaaagagtcgaatacgcaacccccagtgacgtttagccaatccctggttaggcagttcgaagtaataattagtttgcacaaacggcgctgcaaatggatagtccgcttttagttgcgagaattgcgccgccgttagcatcgtcttaaattcgcgttcaatcgtttgtgacatcggttgagctcctttttaaaaaagcaatgttattatcctagcacaaaaaagcagacttgtaatgaaatttgtatttcagacgattattatttattcaattctaatctatgttaaaatagtgctgtatgtgacagagtgaatgaggggtttataatggtcgaaaattggaagaagtttttaatgccttatgaacaggccgttagcgaattaaaaattaaattacgtgggatgcgcaagcaataccaacaaaataatgaacatgcacccatcgaatttgtaactgggcgcgttaaaccaatcgatagtatcaaagaaaagatgcaacgccgctacattacagaagatttactcgaacaagatatgcaagatatcgctggtttgcggattatgtgtcagtttgtggaagatatccatgaaattgtgggccttttgcaccaacggactgatatgaaaattgttgaagaacgggattacgtttcaaatgttaaaccaagtggttaccggtcatatcatattgtaattgaatatccagtccaactaatcagtggtgaaaaattgattttggccgagattcagattcgaacaatgtcgatgaacttttgggcaaccattgaacattcattaaattataaatatcaaggggaatttcctgaaacgctgaaggcgcggcttaaaagagcggccgaagcatcctttatgttagataaagaaatgtctgaaattcgtgaagaaattcaagaagcacaacaactcttctcatatggaaaatggcaaaacgcacttgaaaaggcaactgaaaatgattctgaaggagagacgccagattgaaagtaacggtatttagcaatgacggtagttcttccgttcaagttgccaatcgcttaacgcaaaaattgatcaatacggggtttgtcattgatgatcaaacgcccgatgtggtcatttcagttggtggagatgggacgcttttatctgcctttcatcggtacacccacgatttagcgcacatccggtttattggcgtgcacacgggacatttagggttttacactgactggcgcgattttgaagtcgatgatctagtcgtcgccttgcaagaagatctcgggcagagtattagctatccgttattagaagttaaaatcgaatatgcggatacgcacgaaatcagtcgcagtttggcgctcaatgaagtgacgttacgtcggtatgcagcgactttgcggacggacgtttacattaaagagaatttttttgaaagttttaggggcgatgggctctgtatttccacaccaactgggtcgacagcttatagtaagtcgattggtggggcggttttacatccacgcttagacgcgatgcagatgaccgaaattgcgtcgattaataatcgcgtatatcgaacactatcggcaccaatcgtgttaccatcggatgaatggttgctcctgaagccttctaagacaagtgattacgttgtgacaattgatcaattcacatttaaggatcgaccaattgcctcgatgcaatttaaaattgcaaaggaaagaatacagtttgcacgttatcgacacaaccatttctggaaccgtgtcgaagatgcatttattgggtcaaaacatgaaatttgaatggcaatatcaagatgcagaaggctgtgtgttgcggaattttttacggcggcataagctttctcgcagtcagttaactaaaattaaatttgcaggtggcacaatcctcgtcaacggccaggaggcacataccaatgcccaactggttcaaaacgatgtggtgactgtttacctcgcaccggaagtggccgtcgaacacgtcatcccagttaaaggggacttgaaagtggtttttgaagacgaccattttttagtggtcgataaaccggcgtttgtggcgtcgttaccggcaccgaaccatccgcacaacacaatggccaatttcgtcaaacaatacttgattgaccaaaatgctgagagccaggcagtgcacgtagtaacgcgcctcgatcgcgatacaagtggtttgatgatgttcaccaagcacggcttcgcgcatagtttgttggataagcaactccaatctaaagaattgcaaaaaacatatgttgcgattgccagtggtgatatgcggttagattatccgcaacatgcgtggatcgatcggccaatcaaacggtcggatgatttttacatgcggcgggtcgttggggttggtggcaaacgctcattaacggaatattggcaagaagcccatggcaccgatgccacgttagttaagttgaagttactaacaggtcggacacatcagattcgggttcattttgcatcactggggcatcccttaattggtgataatttatacggtgtggccgatgatttattaccgcgtcaagcattgcactgtcgcgagttaacgttctatcatccatttgaagaacggtatgtcacggttcaaagcgaactaccagccgattttcaagcagtgatggatcaacgtcatttggcttttcctgcgggcgaattgaataaaatttgattaagctttcaatttgagtcgcaatctaactttagaatgagtatactaataaacgattatggattacggagggattagtattgtgttaactttaaatatgattaagacaatcattttagggattgtcgaaggttttacagaatggctaccaattagttcaaccggccatttagtgttggtcggtagtgttttgaaacttgatgaatcaaaagcattcatcgatatgtttaattatgtgattcaatttggagcgattatggcggttgtgattctatacttccataaattgaatcctttctcaccacgtaagaaccagctcgaacaaaaacaaacgtggacgttatggtttaaggtaattgtggcggtgattccatcagtcattattggattcccattgaatgactggatggatgaacatctgatgaaaaactggattgtggccagcatgttgattttatacggggttttgttcatcgtcatcgaaaatcgcaacaagcataccacaccgaaatttgctgatttaaatacgttaccttggttgacggccttttggattggctgtttccaagccttatcaattattcctgggacatcccgttcaggcgctacgattttaggggcaattattttagggacatcacggtttgtgggtgcggaattctcgttcttcatggcgattccaacgatggtcggcgtggcaatcttgaagattggtaaattcttgtaccaaggcaatacgtttacgggcgatcaatcaatcattttattagtcgggatgttggtttcattcatcgtttcaattatttcaatcaaattcttgatggattacatcaagaaacatgatttcaaggtcttcggttggtaccggattatcttgggcctacttgtcttaggtgcaatgctatttgcataaaggattaaattaaaatttggagggttcatccatgttaatcaaagaagtttgtgttgaaaatttcactaaaattccggcagcaatccgcaatggtgctaaacgaattgagttgaacgacaacttggctgtcggaggcacaacggttagccggggtgtgatggctgaatcagtgcgttatgcgcatgaacacgatgtaccagtgatggtcatgattcgtccgcgtggcggcaactttgtttataacgatcaagaattaaaaattatggaagctgatatcttttcagcgcaagaattaggcgctgacggcatcgtccttggttgcctaacacctgacaatcaaatcgacgaagaagcgatggaaatgttgattggtgctgccaatgggatgcaagttgttttccatatggctttcgatgaaattgcggctgatcaacaagctgcagcaatggaatggctgattgatcatgatgttaaacggattttaacgcatggggggccgttagacgcgcccatcgacgaagcccgtttaaaaacgttaattcaagctgctgatgggcggattgtgattttacctggcggtggcattacagccgacaatgtcgacgcgttaacagaacgtttacaaatttccgaagcacacggtacaaaagtggtcgggacattataagatagtaaaaggcccagtcatcaatgatgactgggcctttttttaatgtttgaataggagataatcgactgacgacgcactctaaacgtgctcacccagtcatctctttccggttagcgacgattgtcaaacgattgctttcagcaatcattcgccagtctaggctaatcctcaagagatacccgactgggatcacactctaaacgtgctctgtaaggcatccgcttccggttaaccctgagccgcaaacgattacgttgtaatcattcacgacgctgtgttaatcctcagcggatattcgccttacgacgcactctaaattttttctatcgctaggacttgtccttggtcggcgttgattgccttgtagtgggttacttggtaattggttggttctaggcgacttaagtcggcgattagatagtcgatttcttcttgagtttcattgaaccgaggatcaacaacgaataccagtaagccaccgcgattaagccgtgagagaatttgatgataggcagagattgtcgtgttaggcaatgtcacgtgttcaaaagaatcaggactgagtgcgcctaagctaaaaatggcggcttgcacttttaactcgggtggtaaggcagtgataatccgctcgtgtccttgattaagcaaagtaacctggtttgcttggtttgcttttgtaagacgatccgcgcaggtttcgatggcttctttttgaatttcgaaaccgtaaacctgaccaaaatcagcaacgcgttctgctaaaaataaggtatcatcgccatgccccacggtggcatcaattacgacatcgccgggccgaattgcctggtctaatagaaaatgtgcaaatttagtgggatgatcaagtatcatgtgttaggactccttcagatgcaataatttaaaatgaataaaacagtaccatgaaccgccgagacacgccgttgctaataaaaagccagctaagacatcactcggataatgaacaagtacgtaaatccgactaaggccgatgcatagtgccaatattaaacaggtgccaatcgctatttttcgccaaacgcgttgacgaattaagtagtaaactaggatgcttaaagttccgaaaaaaagaagtgcccccgaagcatgaccgctagggaagctgtagccgcctgcgtagacaagatggtgaaatgggggccgtggtcgttggacgctcatcttaataaagtggttaagcgttgaaaaaaggaccatgttaatgactaaaaagctagctgctgaccactgtttaaagcccagcaaaccaagcgttacaatggtggtcaaagtcattatactatagggattgccgatcgacgtaatcgcaatgcttacagtatccatcaatggggaggaaagcgaccggatgccagttctgataagggtatcaaaatgtataacccaagtggcatggtgcacaacgctgattaaaatgattagaaaactgattgtgccaagaatgaataaactagccgaaaatcgtttggtcatttttaagaaatcctttcaaaataagctgtaattaaagacaaagaagattattaaatgatacaataattattaagcataagacaactaataaaagtagttgcgtgataggattgttttccccatttattaatattataataaagttcaggtgaagctcaagttaattgtgccacagacaataataatggaaattcggaggcgttagaattgaaagagactagaaaacagcgaattgcagctcaaaaggtaagcttacataagcagaagcgggaaattagaattaagaaagttcgtaatgtgacgacttttgcaggggcaaccgtcttgatgggttcagcaattgcacctagtttttcgaatcgggccaaagcagccactgaagatgtgttaaatagtgcaaacaatgatgaccaagctacaacagctaatacagcaagtagtgcaacatcatcaacaactagttcaagcacaacgacaactgaatcccaatcaacacaacaacctgttgtaaaacctcaattgactgaaaatgaagcgacaaaggtggctacgccacaaccggcaccatctcaagcgcaaccaatttctggagtgcaaagtacgagtgccaatatcgcaaccgctggcgttgttatggcagcagctaattcaagcgcacaaaatttcatcaattcaattgctagttcagctcaacaattagcgggtgataacgatttgtacgcctctgttatgattgcccaagcatcattagaatcaggatttgggagcagtggtttaggttctgcccctaattataacttgtttggggtaaaagggacttacaatggtagttctgtttatatgtggacttgggaagatgatggtcatgggaacatgtatcagatccaagctgcatttagaaaatatccttcatactaccaatcgttacaagattatgtgcatgtgctacggaatacttcatttggtgcaacgccttattatcaaggggcatttaagagccatacaagtagctatcaacaagccacacaatacttacaaggacgttatgcaacagcaaccaattatgcgtcaagtttgaaccgtttgattcaacaatacaatttaacgcaatatgacacgccagggaccaatactggtaacaataatgggggaacaacgactccaaccacgccaacgactccaacgacacctgaaaatgggacaaaatacaccgttagagccggcgattctgtttgggggattgctaatcggtatgggatttcaatgaatgacttgattagctggaataacatcaagaacaatatgattcacccaggccaagtcttgattgtttcaagtagtgcagctggcaacaacaatggtgggacgacaaacccaacagaccctacaacaccaacgaatccaacaacaccagctaatggtgataagtataccgttaaagccggcgactctgtttgggcgattgccaacaaatatgggatttcaatgaacgatttaattagttggaataacatcaagaataatatgattcaccctggcgatgttctaacagtttcaaaaaccgcaactggcaatacaaataacaataattcaaacagcaataacggtaatcagacttcaaacaagacgtatacggttaaatcaggggattctgtctgggcaatttcaaaccgttacggcatctcaatggctgacttggttaaatggaataatatccggaacaactttatctatcctggtcaaaaattagtggttagccaaggtgcaacaactggtaattcaaacaacaataatacaaatagtacaaatccagggcaagcttctgggaagacttatacggttaaggccggcgattctgtctggggaattgctagccgtaacggtatttcgatggcgcaattaatcaaggctaataatattaagaataactttatctacccaggtcaagtcttaaaattaatggctggcgctacaacgccaacgacgcctaacacgaattctgggaagacttatacggttaaatcaggcgatagtctttggtcaatcgcacaaaaaaataataccagtatcgcacaattaaaatcagcgaacaatttacattctgatttaatcttagtcggccaagtcttgaaattgaagtaagagtttggtatgctaagaacaattatttaacgttgagaaggattagtagttatcgttaagcgtttagagagcgtgtggttagtgtgaacacgtcgtttaacataacgaactcgcctttgagttttctattgaactgatagtagatagaaacgtctgccgcgttaaggccagagagttgtccaatatagattggacagaacttaggtggcatcgcggtcaattcgtcctatggtatttataccataggacttttttattggcgttaagtgaattaaaaaagagtgcgtcaaaagtgtccatgcttttgaaagcacgtaaaaaaaaggagtgtttgatatgacttacgatcatcgcgcagttgaacaaaagtggcaagcttactggcaatcacacaaatcgttcaaaacaacagaagataaaaataagaaaaatttctatgcattagatatgttcccatatccgtcaggtcaaggcttacacgttggccatcctgaaggttatacggcaactgatatcttggcccggatgaaacggatgcaaggcttcaacgtgttgcacccaatgggttgggatgcattcggcttacctgctgaacaatatgcgttggatactgggaacaatcctgctgatttcacgcaaaccaatattaatacgttcaaacgccaaatcaattcattaggcttctcatacgattgggatcgtgaagtgaatacaacggatcctgatttctacaaatggacccaatggatttttgaaaaaatgtacgaaaagggcttagcttatgaagctgaagtggctgttaactggagccctgatttagggaccgttgtcgcaaacgaagaagtcattgacggcaaaacagaacgcggtggctatcctgtttaccggaaaccaatgcgtcaatggatgttgaagattacggcttatgctgatcgtttaatcgacgacttagacctagttgattggcctgaaagtgtcaaggatatgcaacgcaactggattggccgctcaaaaggcgctgaagtatcatttgctgttgaaaaccacgacgctcagattgatgtcttcaccacgcgtgccgacacaatgtttggtgtcagctatatcgtgatggccccagaacataaattagtggccgatatcacaacgcctgaacaaaaagcagctgttgatgcttatttaaaagaaatcgaacacaagagtgatcttgaacggactgatttggcgaaagataaaacaggggcctttacaggtgcttacgccattaatccagtcaatggcgaacggttaccaatctggatttcagattacgttctagcctcatacgggactggtgctgtgatggctgtccctgcacatgaccctcgtgattgggaatttgcgaagaaatttggtttaccattgaaaccagttgtggctggtggtaatcctgaagaagctgttcacacagaacctggtgtgatgattaattcagatttccttgatggtttagacaaacaagcagcaatcgacaagatgattgattggttagtagcgcataatgctggtcatgaacaagtgagctacaagttgcgtgactggttattctcacgtcaacgctactggggtgaaccgattccaattattcattgggaagatggcacaacatcagtggtgccagaagctcaattaccacttgaattaccattaacaagtgatatcaagccttcagggactggtgaaagtccacttgcgaacttagcggactggttaaacgtaaccgacgaaaatgggcgcaaaggccgtcgtgaaacgaatacaatgccacaatgggctggtagctcatggtattaccttcgttatatcgatcctaagaaccctgataaattggctgactttgataagttgaaagactggttaccagttgatatgtacatcggtggtgcggaacatgctgtgcttcatttattatatgttcgtttctggcacaagttcttgtatgatatcggggtcgtgccaacgaaggaaccattccaacacctatataaccaaggtatgattttaggcgataaccacgaaaaaatgtcgaaatcaaaagggaacgttgttaaccctgatgatgttgtcgatcgctttggcgctgatacattacgtttatacgaaatgttcatgggcccattagatgcttccatttcatggagtgaaaagggcttagccggcgcgcgtaaattcttggaccgggtatggcgtctatacacagaagaagataccgacgaaaacgaccaactatcaagcaagattgtcgctgaaaatgatgaacaattgaagaagagttacaacgaaactgttaagaaagtgacagaagacttcgaaagcatgcactttaacgtggccatttcacaattgatggtcttcatcaatgatgcttataaagttgacacactaccacgtgaatacgctgaaggcttcgtgaagttattagcgccaattgcaccacacatgatggaagaattatgggcaatgcttggccatgatgactcaatcagttacgtggactggccaacatttgacccagcagcattggtcgctaacgaagtagaagtgatcttccaagttaacggtaagttaaaggccaaagtaacagtagctaaagacacaccgaaggaagaattagaagcgatggctaaggcaaatgaaaaagtagctgaattcattgctgacaagacggtgcgcaaagtgattgccattccaaataaattggtcaatatcgtcgccaattagagtgcgtttcaaaaagagtgggttcaagctcggtcaacttttgagcattatcagagggaagcgaataagcgacgtagtcgattgtttgattcactgggataagcgcagaaagttagcttgaaaagcacgtttcagacaagagtgcgtttggttgcggttagcaactgagcattaataaaaaatttcaaataatccaggttttaggattatttgaaattttagattaagcggaagttgttgcaaccaaaaagcatgtttcaaaaaagcagttactgtttctcgcagtaactgctttttcttatttaaaattaatatttaggggcctaattatccttcaattaatataagggttattctaaagcacttttaagatgataaaaagatgagagcgactattgcttttgggtgttttttattatacgatgataagtaaatttagattctggggttaaccaataatgatgatgctaaaatagaggggtttgaggactatgaaacgaaatttaactgcccgtcagatgcagatgattgcacttggcgggacaattggggttgggctttttatgggggccaacacgacaattaaatggacggggccgtctgtgctgattgcgtatgggattgctggtttattgctgtatctcattatgcgtgcacttggagaaatgctgtatgttgatccagatacggggtcctttgccaagtttgcaacggaatatatgcatccgatttttggttacttaacagcgtggagcaacgtcttccaattcgttgtcgtggggatgagtgaaatgattgccatcggcggttacttagaattctggtggccgaacttgccgggctgggtaccgggactggtcgcgattacgttcttatgtgcggctaacttaatttcagtcagcatgtttggtgaattggaattttggtttgcgctgattaaagtcgtcacgattattctgatgattgtggcaggcctgggtctcattgtttttgggattgggaaccatatgcatccagtcggcatcagtaatttatggacgcacggcttctttacggggggctttaaaggcttcatctttgccttggcaattgtcttggcatcataccaagggattgaattgattgggattacggctggcgaggctgaaaatccacaatcaacattggtcaaagcaattcaatcaacggttgcacggattttgattttctatattggggcgattttcgtgatcttgagtatttatccttggaacgaattgagtcaggtcgggtcaccgtttgtgcaaacctttgctaaaattgggattaccgctgcagcatcaatcattaacttcgtagtgattacagcagccttatcgggtgctaactcagggatttacagtgccagtcgaatgacgtttacgttggccaataatgggcagttaccaaaacgattcttaaaattaaaccgccacggtgtcccattttatgcggtcggtgcgatttcattagggattttaattggggtgattttaaacgccattttaccactcgtttatcctaaagccggcaatgtcttcgtgctcgtgtatagctcaagtgtcttaccagggatggtgccatggttcgtcattttaatcagccaaattgcctttagaaagcaacacgctgacaagatggcacaacatccatttaagatgccttggtcaccttattcgaactacattacattggcgatgctagccatcaccttaatcttcatgttcattaatccggaaacgcggatttcaatcattgttggtttaattttcttaatgatcatggtggttatttatttcgtgaaatttggtcggcaaaaatcatgacaagcaaaaaggcagcctagttggctgcctttttttattcgattggattgattcacccgctgtttggcggcgatcaatgttatcttcgccccataaacagaggagatttaagattttattgagtgactgaccgtattcagagaggctgtattcaacgcggggcggaatttcttgataaattttacgattgatgatgccatcgttttcgagttcgcgtaattgtgcagtgagcaccttttgggaaatctttgggatgcgttgtaagagctcgcttgatcgccgtggttggttgcgcaaatgacaaagaataacgggtttccatttaccgccgataatttccatcgtagcttcaacgccaatgttatatgttttctcattcatttctaattttgattcaccttttcattgtgataagactcaattattacttttcagtaacctactgactaaaaagtgcgtgattgtgaaaatcacgctcctattgaataatatagtacatcagtaaaaaaagtctaataggagtgtggcagtatgagtagtaaacaacgggcgaacctcacattactagcattggcaatcagtgcttttgcgattggttcgacagaattcatcagtgtcggcttaatgccattgatgattaaggattttgggattacgatgagtcaagcaggactaaccgtatcgatgtatgctttgggaattacgattggggcaccgattttggcgattttaacaagtcgttggccacggaaaaatttattgttggggattatggttgtctttatcattggtaacttgacggtcgcttttgcgccagtcttcgcctgtaacgccgattttagaatcaaaaatgggttggtcaccaagggccgttgtgatcatcttaattatttatggtctgatggtggcttttggaaatacgttgggtggcaaatggtcaaatcaccaaccgttgatggcgctattgaaaatgtttgttggcttgttagtgaccttgttgctattcaggttaacgttaaatgcccattggttcggtttaattaacgttttattgatgggctttttcgccttcatgaacgttccagggctccaattatacattgtgcagttggctgaaaaaatcaggccaaatgatattccattggcttcggctttgaatatctcagcctttaatatcgggattacgataggctcattagttggcgggcaagcatcggcagcttggggcttagacagtacaccaatctttggcggtatcatggtttttgtcagcattctgttgacgtggtatttgattcaacaaagtaaacaagctaaataatgagatggcagagagctccgcgaaggcggggctctttttttgaaacgtgctattggcgctagatttctgcgcctaactacaaaacgggaatcatggccgagtacgccataattcccgtttttagtttagtgctcaaaatctgggcaagcgctaatagcactcttattgaaacgtgcttctgatgacaacaacttccgcttaatctaaaattcccaataatcttaaaacctggattattgggaattttgtattaatgctcagttgctaaccgtcatcagaagcactctttttcataaagttttgttaaaggaattgcaaggcttggggcaatcctctaaaatggtaggaagatgctttttgacgtttaataagggagttatgggaaatgaccaattcacctgaaacaaaggcgacggatagatcttcacaaagtaagatgttacggggctccgcttggatgaccgctgggagtattttctcgcgaattctgggcgccgtctatgtaattccgtggccaatctggtttggcgcgaatttcttacaagccaacacattatttgcaaaaggataccaaatttatagtgtctttttagtgatctcgacggctgggattccaggggcgctatcgaaacaaattgcacgctataacgaaatgaatgagtatggcattggtcagcgtcttttcagaaagtcgctgattttaatgttggcaatgggtgttttatcagcgctcgcactctttgcgttagcgcccgttctagcagcgggtgatccgcggatggtaccggtcttccggtcattaagctggccgctattgattattccattgctcagtattatgcggggctttttccaaggctatgccgaaatggcgccgtctgcgatttcgcaatttattgaacaagcagcccgcgtgctgtacatgaccgtgaccgcttttatgattatgcaagtgtttaaaggcagctacgtggatgctgtgacgcaggcgacatttgccgcattcattggggctgctgccggcttgttattactgattttctattatttgaaacaacgcggtcgcatttcagagttagtggccaatagtaacaacgaattagaagtgtcaacgactgacttgttaaaagggattgtgcgccaatcaattccattcatcgtaatcgacgcaagtgtcaacttggtctatatcatcgaccaatacacgtttaatccgatgatgcatgatttcgtggttgccagtgatcatcagttgtataacttgtatgctttatttgcagctaatgcgaataaactgatttcaatcaccgtttcactcgctgctgccatggcggtcacggcgattccattgatgtcagctgcgcatgtgcggggcaatcaaaaagaattgcaacatcaaatcggcagtactttgcaattattcaacttagtgatgattccagcggcatttgggatggcggcggttgccggtccgctttacacgttattctacgcgcatgatacgcttgggattagtgtcttacaattttcatcttacatttctattatgctcggcctctttacggttttaggcgctgtcttacaaggcctctatcagaaccgcttggcattgttttacttattcatcggattcatcgtcaaaattgtggcgcagtacccagcgatttattttttccgtgtctatggcccgctagtatcgaccggcttagcctttgcgacaagttcggttttaatgattgcagcactgcatcgctattatcactttgcattacgcaaaaccattcggcgcttaatcggcgttttaggcttctcattggtgatgtatttggtaacggcgggggcagtcaaggggttataccttgtctttaacccgtacagccgtcttcagagcgttctagtcttaatgattagcgttggcctaggtgtggctgtttacgccgcattggtgcttaaatcgcgcttagcggactatgtcattgggagtaacttggatcggtttagaagaaagttgagaatcaaatgagaattgatcgctttttaagtcatatgaatgtggcttcacgcaaagaattaaaggtactttttaaagcgggacgcgtgcgcgttgatgggactgtggtcaaagatgcgaagttcaaagtgaacgaggcgaccgttgtctatgttgacgacgaacccgtgcgttatcaaacctatttttattggctgatgaacaaaccggcgggtgtgatttcggcgacgactgatccccagaaaacagtgcttgatttattggcaccagcggacttgcgggatgatctgtttccagtggggcgattggataaagacacgactggtttattgttgttgacgaacgatggcgatttaagccatgccttgttgagtcctaaaaaacatgtcagtaaagtttatcgtgccacgattgccgggattgtcacggcagaggatcaagcgcggtttgaagcggggctcgtgttgagtgattttactgcacaaccagcacagcttgaaattctgagtgttgatgaggcgcaacaagaaagtcagattaccgttgagattcatgaaggtaaattccatcaagtgaagcggatgtttcatgcggtcggcaaggaagtcttgacgctagaacggcttaagatgggaccactggcattgccagatgatttagaccgtggccaataccgtgcgttgacagatgcagaacttgcattacttaaagcgaattaataaacagcagccctttcaaaaggactgctgtttttttaagattgatgaatcattttagccatatagtgtggtaaggtctgaatcacttggctaggaagtgtgacgtattgggttttggcgagttcatcagcaatcgcactgtgggtataaacagcggcacaaatcgtctgatagtgggtgccaaattgaccacagaatgcggcaataataccagtcagtgtatcgccgctaccgccagttgccatggaaggcccaccgatggttagttgctgaacctgttgctgatgatagacctcagtgtgatgttttttaagcactaaagtcgcgtttggataagcagcgagtgcggcttgattagcagcaaccgtttgctgctcgattgcaacaccgctgaggcgcgcccattccatttgatgcggggttaaaatgagttgcgtattcgggatcgtcagtttttcatgtgcgatgattgatagtgctgaaccatcgataatcagtgtttgtgttggttggatggtttgtaagatttttctcagcagttcaacggcaaacgaagtaatgccaagaccaggtccgacaacaacgacatcagcagcctggactgcagacgaccactgcacgaagggttgttgataatcaatgaacatggcttctggtaagcgcgcgtgcagtccgctgagaacacttaagtcactagcaacggaaactaatccagcaccagcataaacagccgcacaggcactcataatcgcagcaccgccgtattgctgactaccaccaatgattaagacgcggccaaaatcgcctttatgactgatggcaggccgtgcctgcaggaccgcacgaacggttgaatttgtgatgacttgcatctgaatccctcccttatcaactattattataagcgaaatattaataaatgggtattggcagggctctgtaacactggtacaatagtcttgtagcacaatcgcccgtgtggcggaattggcagacgcgcagcgttcaggtcgctgtttgggtaaccaagtacaggttcgaatcctgccacgggcattatggattaaaaaaggatcgctatcactttagatagcggtctttttttgttcaaaaagtacatcgattattgattatttacctcattatgactggtttagccaatggattagcgacaattattagcactattcaaaaaaagttgcatcaattttaaggaattaaaccattagtagaaaacgatagctttaaataaatattttcttatcaatataattattatttgaactataaaaacggctgaaagctacaagctgtaaactgcatcgcgattaaaaggtcatttaataaataaaaacatcacaaacttggcgaatttcaataaaaaaatattaatagggttaaaacttattaaaaatatttttttgtcaataccgttaatttcagctatttacatttaattaatttatataataattagctaaaagtatttggctaacttgattataaaacgcgcgatttttatttggaggttcttattatgtttaatggtctattcaaagatctaacaccaaggtcgtttactggtactgcgtcgagttattattagtatcgtgggtctctgtgtcttttcagctttctttattatctttggtgctaaagtaacttttgaaattcttgcaatatttgctcgagatacgactacatttgtcactgtgttgctttacttgctttcattatttatttttttaatcgggttcaaaaccaagattactcaaattagtgttgttacagcttggattagtgaagtacagtttttatttttgttattctcgccaatttggcaaattcacgctggaagagaagttgcgttctatgttattttggctatgaggattctggtcacagtattactggcatttcttttgtatctatatcatcgcaacaataaagcaaatcgaaaataccgtcgataacttaatacaaaaaaataggctagcccttgagggactagcctatttgaatatcatcaataaaaatcgcgttcaaattgcattaaatcattgattaaagacgctgcttgcttcaattcagcatctttatatttttcggtcaccttatcaataacttgcgctttcagcgtttcatgcattttatcgtggctttgcgcaatcacacggcctttagcggtcaaagaataatagatttttttctgatcatctggttttttagtcgcttgaattaagcccatttgaatcaacttcttagcggcgcgtgtaatgccgccacgcgtaaccgccaaccgatccgctagtgctacacctgttaattcttcggcctctaatcctgataatatgtgcaatgcaatgattgatagctgcggaatcatcgttttcaagttctcatcactcagctgattttgcaaccatttttgttcttgaacaccgcggccgttgacactatctgagcgtaattgcttgattgcatgatagagtgccatcactgattcgttttccatttgcttaacctctcatcaattgttaccaccagtatacaccaaattagaatactttagctttggtcgtcgcttccgttagggcccgtgctaatatttgttcacgttgatctgcatgagcatccgcgccttcaatatagacgtgttcaacttgattaacaccatagaatttcaacatattggttaaatacatatcgcctaaatccataagtgcagaactttcgttactcttaatcttaaataaacggcggaacaagaacttaacgatcccccacttgcccccagcgtgataaacactgccagctgcttggatatggattgctttcttaccttctaacaaacctactgaaccgttcggtgtgtatttgaatgttttgtgggcgaccgccgtcaaatctaaatattgtttcatctcagctggtaaaaaatgattgtacattggattgatgaagacatatttatcagcttcgataaattcatctaaccaatctgcgtgttgttgtaatagtgttttctcagcttcagccattggttcgtcaaatttttgtttacgccatgcagccattgtcatatcgttcaatggtggaacacccgcttcagtatatagatctcgaataataatttgatcatcaggatgggtccgacgataagtttctacaaagcgggtccctaccgctagggataaactcttttcaacatggggatgtgcttggattactaataatgtactcatttaaaaaaaccttctttagtttcgtttagttgcttgtcaacaaaataaagattatcatcgttttagttgcttgtcaacaaaatgttttaaattaccgttagctatcaaatttagctgaagtgccctagtagcgccctaacgtgtcatttttaagcaaaaaaaataggctatcccttgagggactagcctatttgtgtaagcttattaaacatgctttttaaagctgactcctgcgcttagctacaatccgcaaacaatcgactaacgtcgattattcacgaatttaggctaatgctcagaatcaacccgctttaaacacactctttaataattagtttaatttcttcttgcttactacgtttaagttttcgtctaaatcataaacaactggttcgcctgttgccatttcaacgtccatgatgtcttcatcagagatgttttcgatgtattttgttaaggcgcgtagtgagttaccgtgagcggctacaatgatattttggccgtcgattaattttggagcgatttcgtcttcccagaatgggataacacgttccaaagtaaccttcaagttttcgccaccaggaattgcttttggatctaagtgtgcgtaacgacggtcgtttgctgctgaaccttcatcacttgcatccaatagtggaggaagtgtgtcgtatgaacgacgccagatgtgaacttgttcgtcgccccatttttcagctgcttcagctttgttttgaccttgtaatgcaccataatgacgttcgtttaagcgccatgatttcatttctggaacccataattgatctgaaccttcaagtgcatagtgtaatgtcttgatggcacgagtcaatactgatgtgtaagcttggtcaaaaaggatgccttcttttttcaataaagcaccagcgttttgagcttggcgtacgccttcttcgcttaagttaacatcaacccaaccagtgaattggtttgataagttccattcactttgtccgtgacgaataaaaactaatttagccatgtgtaagtaacctcactttttttatttttactctgttcattttacactgtttgctacacaatttacagtcttatcttttcagaaaataatgaaccttctttttttatgctcgatcagtcgttttcgtttctttcaataagaaaagcgccgccaagatggcaatcaccatgagcactagcgacgtcgttacaacagcgatcatccctttatcaaaagccgtgacaacaatttgttggacctttgcggcatacggtgtcttcactaattgttgcccccacgcgattgcatgtcctgaaaaagcacctgcttcaaccaatgcttgctgaatgccagttgctgccgccttcgggattgagctaccactaaagccagtcttcaaactcgtttcgtaggcattcgtttgtgataaaccgagaatcacaacaccgacggtaattccaatttggcggaaaacattcaataaaccggatgccattccgatttcttgaggattaatattatccatcgccgctgtattgatcattggattgataatcgcattgcctaacccagttagcgcaagcaatggtaagagttgcatataagtaaaatcagtcgttgtcacttgtctaaaaattaataaaccaagggcagaaacagtaaatccaaaagcaatcaaccattttttaccgaatttatagcctagaacacccgtgaatggtcctaaaacaagggaccataaactcattggcagttgatgcacaccggttgaaaaggctgagtaacccatgtaattttgcatcaaactcgtttgataagcggctaaggcaaaaatgccagcgcctaatgagaaagctaaaatcacaacacccacgaaatggcgattcgtaagtaacgtcaagttcatcattggtgcttttgctttcaattccacaaagacgaaaagcgctaaaattaaaacggaagcgactaaccaccccataatgcgcatatctgtccaagcccagtgcatatgttgttctttttgaatcaacccataaatcccggaaaataaactaattgctgacaagatcatccccataaaatcgattgattcgcccgcgccataagctggtgtttctttaacattgcgaatcactaagtaaactgaaataatcccgactggtaaattgacgaaaaagatggatggccagccgaagttttcgactaaaaagccccctactaagggtccaatagcagttgaaaaaccaatcacggagcctaaaatccccagtgcagtcccccgttcgcgcccttcaaagttcgacgccactagtgccatcgataaactcatcatacccgagccaccaatcgcttggaccgcgcgcccgatatctaataccaataaatttggtgccagtccattaacgacagaggccgctgtgaataaaatcatactcatgataaaaattttcttgcgcccgaacatgtcccctaatttggaaacaatcaacaagctgaccgcgtacatcaacgtataagcgttcaaaacccattgtaagttgctaaaagttgttttaaaatcaatcgccatacttggtaaagcgacattgacgacagttacgtctagcaatcccataaagacacccagactcatcgcgaccagcgctatccagcggttggttgtttttttcattttactatctccattttctctatctcatttatttgtgcttgtagccaatccattttggctttgatcgttgtgattacgaaatcggttgaacgaatctgccaataataataatccgtcattgtctcatccgcatcttttaattcagttagatgtttttccacaccgctataaacatgtaaatcttcagccaactcactgtagaaatcttgtaaaatgctgacttgttctgctgcatcaatgtagtgcatcccacgcatcttaaagcgataagcatcatcccacttcgcatcatgaacgactggtttagccattaattcagcaaaatagcgccgtccctcttcagtaatgtgcgcaatcttcgtaccacgtgaatcctgatcagcttcctcaaacccaatgcagcctttgctttccaatttatctaacaacggatacaaaaccccatttgaaattttccgtctgggcaccatcgcattttccaagataatccgcaacttatagcccgacatattccggctcattaaggcggataacatcagcaattcatacataaacgcataacctctctctttaatcagtcttttagacaggtctttaagacttattaagtatagttctttccgacatatttacaagcctttttttcatttttagacaaataaaaaaacatgatccgcataagttgcctgataacaaggcttcatgcggatcacgcttttatggatttagggatgtataggttgtacactctctctttcaactaattcaattgaaagtactttttgttgtggcgcaatagcaggctccacaatccggttcaataatagacgtgttgcttcttgcccaagctcgaaaatcggttgcttaatggtcgtcaattttggtgtgacatattcacaccaatcgatgttatcatagccaatcactgagatatcttctggcacctgtactcgtaattcacgtaacccacgaatcaatccgatagcgagttcatcattgattgcaaatacagcagttaccccgctatcaatcacctgtcgtgcaacttggtaaccacctaatttcgttaacggtgtcgttatttgccactcatccgccactggtaattgggctttcaacatcgcggcttgataaccaatgaatcgttgttcgatgttccaagctcgttgttctggtaaaacaattccgactttatgatggcctcgttcaatgagataccgtgcggccaactctccaccttgcgtatcggcaaccgtaatttcatctcccgcatgttgtttatctgattgatctaataagataaacgggatttgtcgtttttgcagatagctatccaacgttgttttttgtaaatgagggacagccaaaataaagccgtcaacatttcgacgaaccaattcctttaaataatgatcaactttctgattatgcgcccctgcactataaattaatgggatgaaatcgaattgataggcaatttcttcgacaccttgaataaactgactaaaaaaaggattattgatatccggcaccaataccgcgatcgtcttcgtttctttattaatcatattttgcgcgaaataatcaggttcatactgaagtctttcccgagcggctttgacccgcgcaatcgtttctgcgctaaagcgctcacctttattattaagaattaacgaaactgttgtgaccgatgtttgcgccagcgcggcaacatctttaatcgttacttttcgaaccattttggcactcccccgaatcaaattaataaaaacacccacagccggctagccatggacgctgttaatatgattataactgaatatccttttcataaggaatcgaattttgcgcccctttagtttggactgcaatcgaagaagccttattggcataagtcattgctgcttcaatgttactgtaatccaattcaagtttcgtacttaaagcaccgataaaggtatcaccagcagcggttgtatcgactgcttgaactttaaatgccggtacaaacccggttgttgttggtgttgcatagaatgagccctttgccccaaccgtaatgataacgactttaatccccatcttaaacatcgcttccacgttagctttcattgatgcttcgtcagtcactttaatccctgtgataatttcagcttccgtttcattagggacaatcatgtccgtcactgccaataattcagctggaatatttttaatcgctggtgcagggttcaaaatcgtttgaacgccgtttgaacgggcaattttgaaagcttcaataattgcaggaataggtacttcgaattgagcgacaattctgtcagcatctttgatggcttcttcggcttcatgaatatcatcgactgtcacatcttggttggccccaccatagattaaaatactattttgtccactagcatccaccatgatgtaagcttggccagtcccagctgtttcagaacaacgaacgtgatcaatgttcatgccatcttttttgaacgtatctagcatgaaatcagcggcgccttccttaccaaccttactaatgaaagctgtttgcgcacctgaccgaacagctgcgattgcttggtttgcacccttaccaccaccagcaactgcgcggccatccattgctaatgtttcacctggttgtggaaaacgctgaacgtttaaaattgtgtcgacatttgttgaccctaatacgattacttttttcatttgaaagccctcctaatggttaaaatacaacgccactttctaaaataatgttggaataaggtgtcatttcacccgtgcgaacaaatgctttggcctgccccaagtcctgtttcatttgtgcgtgatcaataaattcaatgggcgtctcaccaatcacttttttgatttgttcaagttgtgctggattagctgttttaatttcgtttgctaagtaaactttttgaatttccaattctgttagaacatttttaagtacttgaataaaacttggtacaccattttcgatggccacatcgattttttgcgttccagctgggaccggcatcccagcatcgccaatactcattgtatcaaaatgtcccatgtttgaaatcacatttgaaatttgtgaattgataacttgtgtttttcgcataataaatccgccccactttttatttgataaaggctgtcacagatccagccactaatacgagtactaaaccaattaatacggcaaccatttcttttttagtcttttgttctttcaacacataaatcccaccgattgtggcgaaaatgacactggtttgggataaaacaaaccccgttgctaagccattcacagaaggttgtgctgagataagatacgtcagcgctgcaaacgcgaagaagaacccactgaagatattcttatacgaagttgcttctttgaaaggttgataagtcttgctggtttgggttaatccgaagataacacctacaattgccattcctaatgcttgtggcaaaaagccttggaaaccgtccgcgtgtattgcttgtggaaaggcggagtaccctaggtagcctagttcgccaactaataataacaagatgccacgcaccgcgccatttttactagcgcttgaacgatcttcactccaggctgttaaataaacaccaaggataattagaataatcgctgtgaacccaatcaacttcgattgtgtacttgcccagttacccaagatgaagacgccccacaaagatgccccaacaagttggaacccagttgtgattggcatcgttctagaaacacccatggtttcaaaaacatgaaaggtgataatctgcgctaatgcccaacaagcccctgaaattaaacaaaaaataaatgttttggtttctggaatcggtgtcccgcggaaaatagccacaataatggccagaattaatgtcccaagtgtcgttccaataatttgactcgctggtttcccaccaattttaccaacgatcacagggaacaatccccaaccaatcatcggcattaatccaattaagatattgacagcattcatattcaatcctccgtcctttattctaggctagtaaaacgttttactaactatcatggtgattattataaaggagcttctttgagaattcaactcttttttgtaaccgctttattaaagaacacaaaaaagattaatctggcgcgcatttggcctgattaatctttttttaatttattttttcttgcttgtccgtatcctcgtttagatttataacctgcatctaaaatttgacacatttcaacataatgtcgttgctgtgtttcttcagctttagcgccgtaaacataacgtgcccattcgcgttgatagcctggtgttagtgcgtcgaaaaaggtttttgtggctggtgtatcttctaatcgagcactcaatcggggaatctcaacttcatattctgatagtggtttttgtggcatggtgcataactcccttattttaaccgcataacatctctggcaatcatcaactcttcattagttggcacaatcaggaccttaacgcgtgattgatcactgctgataatgcgttcttggctgcggacattatttttatcttcatccaattctacaccaaaacaagcgagttgttcacaaatggcagcccgtaattcactgccgttctcaccactaccggcagtaaagaccagcgtatctactccattcattaaagctacgtaagaaccgacatacttcacaactcgattgacaaaaatatcaagcgccaattgggattgtggtcgtgagtcagcggtttcttctaaatcacgcatatccggtgatagttcagaaatccctaataagccagacttatggttcaaaattgtgatcatctctggcattgtcttacctaatttttcagctaaaaaggctactaatgagacatcaatatcaccagatcgcgtgcccatcgtaatccccgcaagtggtgtgaaccccattgatgtatcgacagcgtgcccgtcttgaatcgcggtaattgatgcaccactgcccaagtgcaacgtgatcattttttgcgtttcaagcggctgatctagcatttcagccgctcgatgggcaacaaaccgatgactggtcccatgcgcaccgtatttacgggccccatacttttcataatacgcttgcggaatactgtataaatagttttcggcaggtaacgtactgtaaaatgacgtgtcaaaaacagccacttccggtacgcctggcaataatgcagtgaaaattttaatgtaataagcttgggttggattatgcaacggtgcatattcagccaaacgattaatctcattgagcccaaccggattaattactgcagagtccttgaaggcttctccaccagcaaccacccggtgaccaacccccgtaatctcatcgagatgggttacgatatttaattccttcaaccgcgttaataataacgttgctgcttgttcgtgcgtcgtaatatcttggacttgtttaaacttttcctgattgccatacttcactgtgaatacagaatcagataagcctaaccgatcaatcattcctttagcgattactcgttcagacggcatttcaaataattgccacttcagtgttgaactacctgcattaatagccagaattttttccatgatatcgactcccactctttcataatccgttcatggcttaattgtaagcaatttcataaaaagaaacaagccctattatatcagagtgcgtcatcaacgggtaacttctgagcatttatctaacttagcgaattggcgatgcaatcgccgatttgataagtgtagcaaagcacaggaagttattgatgaaagcacgtttaaggcaagaatgcatttggttgcggtcagcaactgagcattaatacaaactagcgcttaatctcgattttaagattaagtgctagtttagattaagcggaagttgttgcaaccaaaaagcacgttttatccataaaaaaagaaccgcccccacgcggttcttcctatttcataataactattctgcactttcttcgttcattttctttactttatttaggaatgaacggcccatcttgttatcttggtattcacttggttcaatgacatctaaatagaattgatcaatgaatcgaatcaaaccatcgactttatcacggcccatttgtgcttcgatttcacggtatttttcaacatagcggctcaccaaccggtctaaaacgtcttgaccttgtttagttaagctcaaaaatttaacccgttgatctgtttgaagatgttcttcaaccacgtacccattttctttcagtaaccgacattggcgtgaaattgctgaacgactaacactcatcgtcttagctaacttactacctgttaagttttcgttagttgaaatttcgtacataattaaaaattggtcaaaagaaactttgtaatttaaactttctccactgacaaagtcgcttaaattgctgacaatccaccgataaatcaatgaaagatgcgttactacttcccaatcatcagaatacttgcttgttgcttttgctgtcataaccttttctccctttactaaccgatctgtcatgcgtagaaacaattaacggatttaatttattttgctatcaatatattagcatattttgagagaaaagaaaccactcgattcattaaatagctataaatagatttgatgtgcaacaattcaattgaccatataatcatcaacccactatattagtttgtcgtgactatataaaaagaagtcattaaagataaaattattttcatccttaataacttcttttaataacatcttataggttacgatccatattgaacgtcaatttcgataaattaatgcccgacataacgagttccccaatcatcgaggtcgcttcagtcgccatctgcttaacaatcgcatggttttgctcagtcaaatactccgttaaggcagcgccttgatacttttgtgcttccacttgaatggcttcaatcatcgttcgcaattcttgcttacaacggtttaagtaatctacattgccttgaatgtgctggctataatggccttccaccaatactgaaattgtccggtataaccaatatgcactcttcatatcccatttcattggtgtttcgctgaaacttagatccgtatcgttcgcattcgtgaaaaatggaatgaacggtgtatacgttggcatccccattgtgatccacatgatggccgcttgttcctttggcacatcattccgtaattgtaaaatatgtgcattttgcgtccgattcaaaccgattgggcggtaacgatacttgtcggcatcagtcccatgccccattggatcgaatggcgtttcattataatgtgagcctaacaacatttcaatatcttcaacactaattttatgttcaatacgccgaataaatggtaattcagccgattcgggtgacatatcaaaatcagcatcaaataaatgatgggcgtaccaaacccgtggtgtattatagtgccggtctttttcattcatcgtgccaaaaatgtggcggaaattccagcccgttttatccggattcaaatgatgggcttcaacgtattcttgaatgccttctgcccacataaaattgtcggcatccgtgaaatcaacttgttgaatcgccacttggttggcggcaactgcataagcatcatctggaatccgttgtgctagccataaatgccctgtcacaatttccatataccacacttcattgtgatcactaaagagcacactattgccggcgggtgagccgtattgtttaatcaaattaccgagatagctgaccccttcgcgcgccgagttaatgtacggcgcaaccatagcttgcatgcaatcttcatccaacccgtctttcaccaatggatcataagcgagggctttttcatttccatatgtactttcggtacagctcatcgccacgttaacttcgttaatactactttcatcataataaccattatgtttgtaatcaacattcggaacagcgggccatcggtagccattctcaggtaattcggcttcaaacccgtttaaccaagatttaattttagcacccttacgccctttaacagctggattgatgtgaaaccgttgtggtgttaaaggtaaaaaagtatcgtcgttacgcgcaatcatcgttgatccgtccaatgatgcgtttttaccaactaaaattgatgtacatgctgattccataagttgcactccctctgatgaccactttaattgaactcatcggtcacgtttgattaaaattttctcataattaatatccatagtgtacgcttctcacttgcgaaagtatagcctgattttttgattaatttcctttaacccccgcatttattgcgatttctatacaatattggatttcacgttaatttccgatttcggaattatcgtcaaacgaccatgttagcgctcctaatttcatgatatattattagatgaataactaacaacaaggtggtttctcaatgaaaaaattaacacttgctctgttgctgaccatgaccagctgtttcatgattctagctggctgtcagaataaaacagaaattccagctgccgcaactaaaacagaagaaaaaattgatcaatacgtccaaaaagtgaaccaactctatagtgatggttcccgtaaagatcctgcgaagttaacagccaataaacaacaccaaattatcactgcggctgacaaactcgacaaacaaatcacgcccaacctttatatgagcggaattagcgctgatgcaaaggctgattacaaggctgcccaaaaagatctagataagattactggtaagcaaccagcaactagtgaatctgaaagtgttgcttctgaaaagcctgctaaaaagaagaaaaagaacaaagttaaaacaagcgcctttttcgataaagatgggattgtcaaagccgatgcacaacttggtgaagaaacggactataccgaccaccccaaacaacttgctgattatcaagaagctaaaaatcaattagcggctatggcagctgtccggaacttatttacagacgacaacctcaagcatattccagctaacctatctgctagcgacttcccttacgtccgagctttgattaataaatcaacccatgacggctttaaagaaaagtacttggcgtatgttaagaacgctgaaaatcaatacaacacttactctaacaatacccaagcggcaaccacgcaaaacacaacaaccgctaatcaagcaacaactaaccaaaacacagctaccaatacacaaactacgacaggctatgctgctaacacggcaacggggaatggcactggtgcaacaactggaactgggacggggacttcgacaacggataccacaaccggaaccgggacgactggtacacaaagtaatactcagaccggtacagatcagacacaaaccggtacactccaataatcttaagacacttcctaaaaagtacgctatcttcttgatatgcgtacttttttgacgttcgcttacgtttagtcttttaatcgccgatatcttaagaaacatgtaacagcgcgctaactattatgtaacatgtttgttactttcagatgctatgctaatcagcgtactaaattaattcaaaattcaaacaacttaaaaaatttttcgaaggagcacaacaaacgcatgaaaaaacaaaaaatgacttacttatcttctggaatggttggccttgccggcttagtattgatgggtcttcaaacaaatgatgcccaagctgcaacaaatggtacggttaactacgctgacggggcaacaaccgtttggactagcccagcagtaggtcaaaaacctgctcgttacttggcaactaaccaacaagtaacaatccaagacacaaaacaagtttacggccaaacatggtacaaacttggtaatgacgaatgggtttcaagccaattcattacagccggcgatgcaactgctcaaccagctgcaacaacaaccgctgttaagaacacagtaacagctaacttccaatcaggtgcaacaactgtttgggctgacacaactgctgctcaaccaactggcgaatacttaacatatggcacaactaaaaacgtcattgatcaaaaagatttaaacggcacaacttggtaccaattagaaagcaaaggttggattcctgctagctacgttgttttaaacaaccctaacttggatggtgtcacaccaattacaaatgcacctgcagtgacaccagttgctgcaacaaccactacaactgaagttcaagcaccaactgctcctcaagcaacaacgccggcacctgctacagaaacaccagcgcctgctgcaacaactgaagcaacaacccctgttgctacaacaagtacaccagcagcaacaacacaacctgctcaaacacaaacaacgacaactcaaagcagccaacaaacaattcaagctacaacaactcaacaagcaccacaaacgaatacaacgacaaaagcaagtggtaacgcacaaactgttatcaacgctgctttatcacaaatcggtaccccttatgtatggggtggcacaacacctggtgttggtcttgactgttctggtttagtgcaatatgcatacgcacaagctggcgtttcattgaaacgtgttacaactgctcaagaaggtgctggtcaacgcgtctcacttgataacttacaacctggcgatatcctcttctggggtggcgctggcgcttcatatcacgacgcaatctacatcggtggtggccaatacgtccacgcaccacaacctggcgaatcagttaagacagcaagtatctcaagctacttcatgccttcattcgcagttcgcgtcctttaatcaaaaatatgtatttaaaaagagccacatcttaggatgtggctctttttttgtggttaaacttagtttgaaatatatttattttccatattaaaagaccatccaaaggctgcttttcaagcgacttttagatggtcttttaacattattttgaaaaaattcattataattatttagctgatttacgttccttcaagaagttcaatacagcagctgtttcagcgttacgttttttagcattgttttggttaacaggacgacggttaccagaaacactaacatgtaagttttgtgacattgcgcgtttcctcctttcgtgcatatattctattattctaatctgaattgacttatttttcaagttaactttattcgtcttttggttttctgaaatagtttaggagccaactggtcagcggaacggttgctatgaccccaatcactccgattaatagtgcgagtccctcaccaattaaaattttatggttcacaattttactaattggataaccgagttgaatgaaccacatcgttaatgacaagaagctaccgaaaaaactaaagaacagtgtgttaaaagccgtcgcaataattttttcaccgatcgcaatccccgctttaaagagttgcttggggcccatttgtgcgtcgtattctaagatttcgactaaaccactggcaactgcaatactggtctcggcgattgcccctaagctgcccagaatgatcatcatgatactaattttttggaacgacaagccgattgcgagtccaaagccttcaatctcttctgcatcttccgcaccaaagccgtaggtagctgctaactggctgaggggcacaatattgatcagcaagcccaccaccacgattaacgacgtcacaaacgccgtcttggccgttaatggctgcttggtattcatgaagatggatgtcgctaacaaaatcagactcaacagaccactcacaatcagcggttcaaacccacccgccaccaagacgagcgctaatataatcacgacaaaattcaacccgaggctgaagaaaatcgtcaacccttgccagccacagactagcactaataagatcagtaaaattcccgttagcaacatcataggcgtctcacccgcactaaccggctggccaacaagctcgttactggcaccgccaaagtaatcccaatcgcactaatcaccgtctgcgtaaaacttaacgtgacagttcgcgataaggtatacgcaattgtgttgccattgcgtagatacaataaaataattggaaaagcatccgccatgactaaaaagaacaacacattaactaacggaccaataatttcgcgaccaattgtgagtcctgatttaaacaattcagtcttcgtaacgtttggccgttcaatcgctaattgctggagtgacgatgaaatatcggtcgtctcatccatcacagcgcctaaaatcccgagcacgacttccgctaagaagaccgttttatacggctgtaattcataggccatcgtttcataatgcaagccttgatcgccggttaatttcaagacggccatgctgagaaacagtgctaggaacgttgcgccaattgtcgcgccatatgagacaagcatctggcggttgggtcctaatactaaaagtagcgttaaacccgttagaacgaccgctaagccacacataatcggcaataaccaccgtccacccgtcatcgcgtttaaatggagtgttaagacgaatgcgacgagattgaccaagacactgattagcgtcatcaatccgcgcttgagcatcattagtaataggaaactaaacgtcaacagtgttaagccaacgatgattgtatcgcgcttaggctcgtttaaggtccactttttcaaatattgatcacggtgtaaaaagacttgttgtcctttatagtaccgcgtcgacatcgcttgcgacgccgtatacgtattgcgcagcgtaatcacttgccctttttgcttagtgttcaaaaattggcccgtgacccgctggactacttctgtatcttcattttggtacgcatcagtctgttcctcacggctaattgtctggacccgcgttacccgaataatcggttgctgatacaaaccagcatcgaaatacgtccctaatacaccgaggacgcagatgacacttcctattagaccaatccacagccgtttatgttttaccacagtcgtcacctctgttttattctagcgtttctgcgggtgaacgtcagctttttgaggctgatttaatcattatttaagcgactattgaaaatcccatacgtaaagtagaccactaagccgatgacaaaccagattgccgctgcaatccaagtgacttttggcaattcaaacatcatcaataaacatagcgctcctgatattaacggtaaaactgggtaaaatgggactttaaacccatttttattcggaatgtccttgcgcttccgcaatgggatgaccccaatcgacatccagaaaaaagccaccaatgtgccgatgtttaccaaattagtcaattgatccagtgaaacgaacccgcctagaatcatgatgactaccgtcacaattttgatactgttagttggggtttgatgttttgcagtcactttaccaagtgcttttggtaataagccatcacgaccaattgaatagatgaggcgggaactgctgtaagtcatcgtcaacatcatcgtgaacatccctgctaatgcgccgagtgaaatcagaccggcaaaccaattttgatggacgacttgtagcgcgaatgtgaccggattagcaacgtccaattcgcggtacgacaccatccctgtgaggacaaacgccactaatatataaagcaacgtacagatgattaacgtcccaataatcccgataggaagatttttttgtggattcttaacctctgccgccgatgctgacacacagtcaaagccaaggtaagcaaagaagacgagtgatgcccctttgaaaatcccacttaccccaaacggcatgaacggttgccagttagcgggtttcacgtagaaaatcccgacactaatgaaaagtagcactacgcctaatttaatcaaaaccatgatgttattaattcgtgttgatgaacgagtccctcgcattaataatgtcgcaatcaagcccactaccagcatcgcaaacaggttcacataagtgccatgtgccggatcaaacgggccagtaattgcatgcggaatatggatgccaaacccttcgataaatgatacaaaataagccgaccaaccagttgaaactgccgcaactgacaacatatactccaagaataaagcccagccaagcagccaaccgattaactcaccaaaaataatattgccatatgagtaagcacttcccgcaactggtaatgccgatgaaaattcggcgtaacacatcgccgcaacggcacaaacgaccgccgcaatcataaatgaaatcgtgattgccgggccactatgtaacgccgcaatcgttcccggtaagataaaaatcccggtcccaatcactgcccccacgcccaatgcaattaaatccttagccgttaatgttttggccaaccgttgatcttgttgtaaataacgttccagtgattcttttcgtaacatctttgccattaatcccattttaaccactcctatttttattgtatgcactcgactaggcgattactcgccgcctaccaggcttcgtcgcacttctttaacgtgctccttgaactgccttctgcgcttaactacagaatcacaatggcggtcgtacgcccaccattgcgctttttaggttatgctcgaagccaaatcgttcaagtcgcacttctttcttaacgtgctcctcagccagatacttccgtatagctacgtccagtaaacaaagctacaacccagctttattcactggactatgctattactcagtatctaaccaggcttcgtcgcactcatttaataacaaaaaaaggagcccactagtcttcactagtgagctccaccaggaagatgactcggggttacccagccatcttccaattcattaaggtttgtcatttcaactcaaatgccttctccttaatcaaccagtcgattactgggtatcttaaagaaaaagctaaaggcaacacgttgcattgaattcatgacagaccctccttgttattaattagttacttagtataggggataaccatttatttgtaaaggattattttaaaagttgttttctaaaaataatctgctagaatcaaatttaacttattcaatggatgtgactggcattgaaaatcgcatgctatttttctgacaactcgattggtacgaactgttcatgcacgtgcgtggaccgtttatttccgattgccgttagagattgcttgcgttaattttcaggtcagttacctaaagacttgttaaaagacgctgttattgcgtctttttttgtgcatttttaacgacaactgggccaatctcattcaatcaatgaggtgataattcatgggcacaattcaattcaaagcactcacatttaactattcagatcaaacacaaccgttgttcgatcacgtcacgcttcaattcgacgccagttggaaactcggtttaatcgggcgcaatggtcgcggtaaaacaacgttattaaaattacttcaacaccaactaccatttgatggccagttggttaccaatctcgattttcaatatttcccacagactgttacagaacctacgcaactcacacgcgatattctaatgcagctaggtaacctcgacaattcaaccttctggcaagtcgagcgggaactgcggctcctacaagtcgcacccgaaatcgtctggcaaccatttgcttcgttaagtcctggtgaacaaaccaaaatgttactcgccttactattcatcgacgactatcattttcaactgatcgacgaaccaaccaatcacctggatcaagaaggccgccaagtcgttgccaattatttacgccaaaaagccggcttcattgtcgtcagccatgaccgccatttcttaaaccaagtgatcgaccatatcctagcgattaatcgtgccgacatcaccgttcaccaaggcaactaccaaacttggcaaaccgcccacgaccaacaagctgcttatgagcaacaacagaatcaacaactcaagggcgatatcaaacggctgacaaaaacagcacaacaaaaagcgcagtggtcccacgaagctgaaaaagggaaaaacgccgccagtgtcaaaactgaaagtgccaatctcgataaaggcttcatcggtcatcgcgctgctaaggttatgaaacgggcgacgacaattgccaaccgcgcggaagaagcaatcgaagcaaaacaacaactttttaaaaacgttgaaattgctgcaccactgaccatcaatcagcgacccctcaaacccggtcaaaatgtgcttagtgttgatgaacttgtcttacaacaagacggcgtcatccttaatcaaccactctcattcaccttagaagctggtcaacaggtcaccctaactgggattaatggcgcaggtaaatcaacactgattaaggcgttacttgcattacccgcaactgaccacattgccagcggtagtctgcaccttaatccgcacttaaccctctcgtatcttccacaagatttcgatcaactgagcggctcactggccgacttcgctgctgcgaaacaggttgatcatgaacaactgctaagcacgttacgcaaactaggctttgaccgcgatttatttacccaccgtctagaaatgatgagcatggggcaaaaacgcaaagctgcactggcgcgttcgctctgtgaagaggccgactgttacctctgggatgaaccgttgaattacctcgacgtcatcacgcgtgaacaaattcaagccctaattgccgagcaacgcccaaccctcctattcatcgagcatgatgttgacttcgttaacgccatcgccacccaaacctacgcacttcaaccacaacactaatccgtattatttgtataccgtgtcacgttgtacccgcgcacgttgaagtaagtcgttggcgactcatcatcaaaaaaggccgggttcatatcattaagtcgcgtttcggtattggttaacgtttgttccggcagtgctaaattttcacggagccgattcgaagcagcctgcaaatcttctgtactaatgatttgataggtactgccgttaagccacgccgttttacctagcaattggctgctgacaatttcaccactactttgatgatagttgcgaatcaactgcttcacttggtcggctgtaaaatcagtgctaattttctgaccaagcttagtcattaagtcaccaatgttcatcaaatattttggcttttgaattttttgcgcaacttgtttcaaaacttcttgttgccgcaattgccgcccatagtccccgcgcggatcttgataacgcatccgactataagcaagcgcctgatcaccattgagatgatggtggccttgtggaatcacttgtccattcaaattaacgtcaatcaccgtatcgatggtaatccccccgacaaaatcaaccaattctttgagtgcgcccatatcgaccgtcaccgagtagtcaatcgggagccctaaaaactgactgactgtttttttcgccatcttagccttaccaatttcataagccgcattaattttctgaatattaccgccgtggtcatctgccatctctgccaatgaatcacgcggaatagagtagaccaccgttgcttcttacaccgggttaagtgttacaaccatcatcgaatccgacagaccacgatcaacgcgcccatccgcgcctgtgtcaacgcctaataataggaacgagattggctttcgctgatcaatttgttttgaaattcgactagacccggttttaatcgcatcaacagctttatcctcttgatgcaaataaaaacctagcgccgccagactaatcacaacaatactactgattacaatcacgatactgatctttttcacagtcaattcccctttgtttaaacgcccaccgcatccttttttagatatgaaccaataaatgctgtcccccttttgaatcgttcgattctggcggacagcattttattttaacctttgctttaaccgacgtaagccaactagcatgaccggcgctaagtgcgaccgattaagccatcgtagccaccgggatgtgccggttggtaaaccacgttctaaattgatcaattgcgtctgaatgaattgtcgctcaggaacagtcagtgtgcgctgatcaaaaacaattaacattctaaaaaaggtccgcacatactgctttaaaaatcgtgtgtaagctgcgcgatccacttctgcaattccagccactaattgcgtctcaatgatgtgcagagctgttaagttaactgagaaccactgcggctttagggtactcgtagccgcctcagcatgccctatctcgtaaacatataaaaacgctgcccgatgcctaacaactcggcaatgttgtaaatactgcaagttgaaaattaaatcctcaccgatacgcagcgattcatcgaaccgcaatgcttcagcttcaataatcgctcttcgatacaatttattacatgattgaaagaagacattttgataatagtagtctaaaaaagcccttttgccgtcttgtattgatagtcaccatcttcagtcaaaccaaaagcagaatccgttccgccggctctttcgattttagttctgaatagcacccaatctaccgactgaccgacgactggttcaaataattgggcactgttaaccaagaagtcatcggcattctcagcatcaagttaagcccataaactaatcagtcataaaaaggctgcatcaaaattacttttgatgcagcctctggttcaagcatagactaactacgctttgtttgttattaatctaatttccgttccaactcactaacgatttcagcatgttttgcttccgttaatttaatcttagccatgaagattaacgctgaaataaccaataacgccattggaatgaagaacatgtacattttgaattgcaacaaccccgcgttagtgatatcgcttggtttcgcattcccagtcatgccagcatgaatcgcagccgtcacaacgacgccgtttgcaaaagccccggctagtttatccaataaaggtcgcactgccaatgttacagattcattccgtgtaccacttttcaattgtccgtattcaacactatcggtaatcgtcatcaaagcagccaaaaagaccagtggatatgggaagaagaataagccgaccgcaattaagactacgaccaagttacttccagcaaacaagaagaggatataaccaagcatcatcattgcgattccgccaatatagattgcccggcgatgaattaaagcaaccaatgttgggaacaacgcaactgacacaatccctaagatggcagtaatcacaccaaccgttgagaacgctgcggcgcggcccatgacatatctaaaataatataaaagcagtgagttcgtaatcacataactaaaggcaaataagaaatatgaaagagataaccacattaattggtcatttttaccaatcacactgaaaacgtcacgtaaccgaaccttttcagtattttcccgaatagcactcttttcttctttggttcctaagatggtcgctaaagcgcctaagaatgaaacaaggccaatgacaacggcaaaaccgaaccacccggcactggtttgttcactcccatgactcccagaaaatagttgcgagaagaaaaccaccattggcacaatcacgataatgaccccttgtgcacctaaagtggatccgaaacgcgcaatcgccccaaattttgtccgcttttcagaatcaacactcagcgctggcaacattgaccagaacgagatgtctttaaacgagtagaagatatctaaaatgacgaaaacgattgcaaaaagaactaagtaaagataagggctacttgtcgcaagccctccaaagttggtaaaaatcatggccaagccaacagagctaataattgaccccgccagtaaccacggcttaaatttcccccaacgcgtccgtgtattatcaaccactccaccaatcagcggatcgaaggcaatttcaacaatccgaatgaccatcattgtataagtgacatacgcaatcatttttgaattaaagcctgcatttttggtatcgaataattgactcgtgacgaacatcataaaataagtgctaagtgttgcataaaaggcgtcatgcccaaaggccccaaaagcgtaagaactatactgtttaacatcttttagttttttcatttctttagattcctttcgatagtttcttcattgtaaacatgctttcatcaagcacaaccctcgggttatcccgtttgatgacgcactctagtgatagcgatgttcgataattttttccaaaatcgcttggcgttgcttttctttggctgagccgaattggttttcttccaatgaattaaaatcgttggcgagtaaaactgattctagatataacgtcaattgacgcttgatataaaccttattgtcttcattcgtttgcttgggattcccagcgataattgctgcagcaaattggtctggatcgataataattttgttgtcgttcatcctagtcgcttctttctcttttagttagtaaacgtttactatctacaccatacaaataaatcaatctgtacaagaactatcctgtaaacgcattcttttagattgcaatcttattttactaaacttttagtaaaatgtaaacggttatttggaaaccgttacattcatcactggttacagttatgaatttaatttcactaaatatttatttttttattttttattgaaatttaatttcattagcgctatactacatctatagaaaacgctttaaaaagaaaggagttgctttatgtttggtttttctatctatcttaatcaaccgttcacctcagcaagccgcatgaaccttcaaaaaatgcacgccgctggcttcacagaagtcttcacgtcgatgcatattcctgaagatgacatttcacaatacactgctagaatcaaagcactcagcactgcgtgtcgcgaagaacacttacaattgatgattgatattgaaacaagttcattaccagcagttggtctctcacttaacgatcccgccgcaatactgtcctttgggattactggtttgcgaattgatttcggcatcgataattcaaccattgctaagttatcacaatatttgaagattgccctcaacgcaagcacaattgccgaacaagatttagccgttttacgcgcagctggtgccaacttcgctaacatagaagcttggcataattattaccctagaaatgaaaccggtttagaacgaacctggtttactgaaaaaaatcagtggcttaaaacgcaaggtttaaccattcaagcttttgttcctggtgatggcattttacgcggaccacttgaagaaggattacccactttggaagcccatcgttatcagcatccgcttgctagtgcgctcgatttattcaactgtgaaacagataaggtcttcatcggtgatccaactttagcaaaaaccactctagcgcaatttgatgcattctaccatcaacacgtcataaccttgtacatgcttaagtcagccccctgccccccttatctttttaaccaacatttccataatcggcgcgatgtcgcccgtgatgtcatcagattagaagaaggccggccactttgtcagaccacaatccaacctgaacagacatcagtacgattacgtggcagcatcaccctcgataaccaagactatggacgttatatgggcgagttacagattaccaaacatgacctacccgcagattctcgtgttaacgttcttggaaaagtcatccaaaaagatcacgcattactgccattcattcaggctggacaagccatccaactaaaggagattgattaatatggatttaagtcatttaacaaccgaaaaccgtaatcaaaagacaatgcaattggacgaactttcaattgaaaaagtactcacactaatgaacgaagaagatcacaatgtgccagaaagtgttaaacaagcactccccaatattgaagctgctgttcaagttatcattcaaagtttccaaaatgagggacgcttaatttatatgggcgctggaacaagcggtcgtcttggtgttctcgatgccgccgaatgtgtccctacttttggaacagaaccggaactggtccaaggtttaatcgccggtggtatgcaagcaatgaccgttgccgttgaaggggcagaagattcaccgacattaggtcgcgaagacttggaagcaatccacttaaccgctaacgatacagtagttggtattgcggctagcggccggaccccatatgtcatcggcggtcttgattatgccaaccaaattggtgccagtactgtcagcttagcttgcaacttcgatgccctcatcagccaacatgccacaattaatatagaagtcgaagttggtcctgaaattttaaccggttcgacccggctcaaatcaggtactgctcaaaaattggtgcttaatatgttatcaactgcttcgatgattggaattggtaaagtctacaaaaacttaatggtcgacgtgaaaccaaccaacgaaaaattagttgaacgtgccaaacgaatcatcatggctgcaactgattgtacttacgatgttgcggcaacccaatttagcgccgccaacgaagacgttaaactcgcaattgttatgattttaacggatttatcggctaatgaagccaaagaacgtttaacacaagcacacggttttgtacgtcaaactattcaataacaaaccttaaggaggcactattatgactgaaaaaaaagaagtacgcttagccagagaaatttacgccgctgttggcggacccgcaaacgtcgctaaattaattcactgtatgacacgtgtgcggatgacaattcgtgacgatgatcaagttgatatgactgcgttaaaagcaatcgatggcgttttaggggttgtcgaagaagacacgcttcaagtcgtcgttggtcctgggattgtcaataaagtcgcccaaatcatggtcgaccaagtcggtgttaaacttggtgaacccttcccagaaaatctcaccacaactgccacagccgcaacaatgaccgaccgcgaaaaagtcgaagcaaaagccgctgaagttaaggcaaaacaaaaagcaaaacaaaagagtacgccaaccaagcgggtcttaaagtcgatttcaaatattttcgttcctttaattccggttttcgtcggcgctggtttaatcgggggaattgccgccgttctatcaaacatgatggtcgctggatcccttggttcaaactggtctgaattcattaccatcttaaacgtcatcaaaaacggcgtcttcgcttatctcgcaatctatgttgggattaacagtgccacagaatttggtgcaactcctggtttaggtggtgtcattggtgctgttacacttctaagtggtgttgatcctaagttgccattacacaatatcttcaatggcgatcctttatctgcaggccaaggtgggattatcggtgtcatcttcgcagtttggattctctcattggttgaaaagaaattgcatcaatttattccagattcaattgatattattgtcacccctacaatttcattattattaattggggtcttcacaattttcatcgttatgccggtagccggtgtgatttcaaattcacttgtcggctcaattaattggattctgaatgtcgggggtgccttctctggtttcgcgctcggtgtactcttcttaccaatggtaatgttcgggctccatcaagtcctcacaccaatccatatcgaaatgatcaacaaaacaggttcaactttacttttacccatcttagcaatggctggtgctggccaagttggggccgcacttgccctttggattcgttgtcgtaagaataaagaactcacaaatatgattaaaggggcgcttcctgttggcttcctcggcattggcgaaccgttaatttacggtgttactttaccattagggaaaccattcatcactgcctgtatcggtggtgggattggcggtgccgtcattggtgcaatgggcggcgttggtgcgattgccatcggacctagtggcttagccttaattcctttaattacaaacggccatcaattcgcttatatcttaggcttgctcgcagcttatgccggtggctttgtcgcaacttatttctttggcattcccaaagatgctacaatggaaaaataacctttaaaggacgctgattttatggaaagcatacttttttcaattcaaaagaaactcccaactttaaccaaaacagaacagcggcttgctcaatacgtacttgcccatccagtacaagtaccgacaatgacaactagtgcgtttgcaaaagcggctaacgttagtgcagcgactgtcgctcgctttggtaaaacactctgtggtcaaggtggctttccagcactcaaattacgactttcatctgaagggaataccgatcaacggctcttcgatgaaattaatccgaccgatacaacaactgacttaaaaaataaactaacttttcgaattaaccaagcgattactgaaaccaatcatcggctcaagaatgacgcgctcgaagaatccgcaatgattctccactcgaaacaaaccattttcatttatgggcttggtgcttcaaacgttgccgctgaggatttacaacaaaaactactgcgcgttggtaaatctgtcattcaatcacttgatacgcatctactggcagcagcactaaccacacagaaaacacaggcagcacttatcttaatttctaactctggcgaaaaacaagagcctctgcaacttgctaaaattgcacaacaacttaatattccaattattgttttaactcataataatcaaagtcaaatcgcacagttagcaaccatcacgttacagcatgatgatagtactgaaaacagtcagctaagaagcgcggcaacgacttcattaattgcacagctttacgctgtcgacctactctattacagtttcttagaacaagatttcaccgctaatacgaaccaattagctgattcatcgaacgttatcagcgaatattttactaagtagaaggagtcatcattatgaaactattctcacgtaaacccaaagaactcgaattacacgctattgtagatggacccgtcatcccgctcaaacaagtaaccgacgccgttttttcaacaaaaatgatgggtgatggttttgcagtaaaccctagtgatagtcatatctactcaccagtggacggtattatctctagtgttttcccaacaaaacacgcgcttgggattacaaccaaaacgggcgttgaattattactccaccttggcttggataccgttgaattaaacggtgcgccgttcaccattcacgttcaagaaggcgatccggtgacaacagaccagttattagttgaaatcgacttagctgcgcttgcttctgcgggtaaagaagcaaccagtatggtgattgtaaccaacatagacgatatcagcggtgttaatgcccccctaacaactagcggacaccacggtgaggttgcacaaatcattaacttataaaaataatatagaaaagccccgctcagatgagcggggcttttctatattatttggctaagactgttatttgattattataacatgcttgattatcaaactgcatcaatactttagtcgctagatcttgcgttgcaaaaactaatctttcaactggcgtatttgccacgttgtaagccatcatgtgtgaaaaataaacaaactgtaacatattactgtatgccgaaacatcgccttgtttcacaatttttttaacgaaaaaattaacgatatgatcgccaaaacgaacataacctggaatcgaaatcagttgtacgttggactgtttagcagcctacacacgattggccgcattatctggcgcgtaaatgaccgttgtccctgtcgtttggtctgttggttgcattgtaattaaagctgtttttgacattaatagatactcctcttaagtgatgataaggtccattgtaccagagattaccgtttattttagtaattctagaaaacggttctgccaaacgttttcgtaaaaggcaattgtctgttcagccgtcatataggcgttgtccgttgtagttgaaagaccagctaccatttggagttggtagcccaaatggtgggcaactttaatcgttgtatcgacgcagtatttggtctgggcaccacaaatttcaagcgatttgatttgcatttggctcaataacgtttgtaagtttgtctgccaaaatgaatccgcatgcgttttttgaacaaagattgccgttttaggcacattcaattctggcattatctaccaagtcgactgaccagcaatcaaagtcttatcgttatgttggacaaaaataatcgggcgactttccgcctgataggcatcaattctggcattaacgcctttaattaattgattaagacgcgcaacaggctgctcacttttgcagacaccattttggagatcaatcactaataaacaatcggctaacttcagcattagtcccctctttcctttaaatcaaatcgagtatatcattatttaactaaacctcatattttgtctgacgatattaaaaagaagagatgcggattacccccacctcttctttttcaatgtctccgatgtttttcccgcttcttaatctggtgttgctgaaaacggctgtattgtatggccttcttttcggcatgttgttcagccctattagttgcatgttgtgctttacgttgactactcatccgaatctttttgttgataccaacgaattgaataccaatgataactgacttggcaccctcaaccacttgcatttaaacaattccttcacatgattatcgctcaatcccccactttcccgccaaaagcgttatactatggataataaataaaaggagtgttttgacatgcaaaaaccaattaaagggtcatgtaccacggtcttagtcggcaaaaaagcttccatcgacggttcaaccatgatttctagaaatgatgatggccacgaagctttggatccacaacgctttgttgtggtcaatcctgaagaccaaccccgagattatcaagcggtgattagcggcgttcaaatccaattgcctgataacccaatgcgctatacctcaattcctaactcattattgacgaacgggatttggccagctgctgggattaacagtgaaaacatcacgatgtctgccacagaaacgattaccactaacccccggattcaagggcttgatccttttgtccctggtggcatcggtgaagaagatattgtgacattagtcttgccttacatccacagtgctcaagaaggggtcgaacgtttaggcgccctccttgaagaattcggcacatacgaaccaaacgggattgccttttctgacaaagacagtgtttggtggcttgaaacaatcggtggtcatcactgggctgctgttcgcatccctgatgatgcatacgtggttgcccctaaccggatgaacatcgatcatttcgactttgattcagccgacacgctttgctcagctgatttaaaaacattaattgatgacaaccacttaaatcctgactttgaaggctacaatctccgtcatattttcggcagtgcttcaatcaaagatacggtttataacaacccacggacatggtacggtcaacaatacttcaatcctgaaatcaaacaagatccaatggaccaagatttaccattcatctgccatgccaaccgcaagatttcaatcgaagacgtcaagttcgtcttgagcgctcactttgaaaatacagaatacgatccttacggtagcgcccctgaagatgttaaaactcgtttccggccaatcggaattaaccggaatcacaacgtgcatattttacaagtgcgcaacaacgtgcctgctgaaattgccggtattcaatggttagcttatggtgccaatacatttaacaccgtcgtgccattctacacgaatatcaacgacacaccagaatcatacaagaatgccacaggtatttttgacttgaacaacatgtactggttaagctgtacaaccgccttacttggcgatacagattacgacttctacgttgatatgcgtaacaccttcgaactcgaagcaatgagtgcctatcacgtgatccaaaacgaaaccgacaaggccttcactgatcaaaaagacgctgcagccttcttggaagccgctaataacaaattagccagcgaatcacttaaacgccaaacagccctacttggccaaatggtgatttcaggctcagaacacatgaaattacgctataacttgaacgactaataattatttaattcaaaaaagagcgtctcagctattcgttagttgaaacgctcttttttgagttgtcctcttttttcagtagcgtataataaatactattactcaaaccacactaaggagtcatttatcttttgaaaccccaaaaattaaaactatcggattacttactcggctttggattcgtattattgatggtgggcattgccactgtcttgaacgatgttgagattattctacccgaaatcgcagccttaacaacggggctgtggatttatcacgaaccgggttggctcaatcaacccgccaagatattttggctgccatcgataaccgccatcgttgggtttggcattaatcggttgccgctcagttatgcagttaaaattagcttactactactcatcatgattgttttactttgtttatttcgctcaacactcgcaccatcgtttgcaacggggctgttaccgattatcgtcaacgccactgaactttcattcatcattgcaattttaggctttacgctcactttgatgttggtcgttagcctccgcaaattgcatctgcaacatccctatcatgccacgattaactatcgcgtcatgctggtttttctaatcattgcactcttatgggtgttagttgttagtttactcggccggccacagatggctgccattccgccggtacttgtcgtcttttttgaaattctacaaaaaccaatgtatccaggtaaaatggccatcaagcagatggttgcattaactggcgccgccacaatcggattcgtcgcttatagcttacttgattcacggttattggtaaccttaattgcactgccactagtttgggcattactctatctgctacaagtcagaattcccgccgcctacgccttccctttattggccattattctcccacaccaaatgtttcaaagtttgccgctcgtcactttactggcaactagttacttttttggggctgcttatttataccagcaatacattaagccgcgtctcatcagcagataacatgacggtttacgactaattttattagttgtaaaccgttttttagtggctttttgcacaagcaataatattgcagtttcgctgagaaataatatagttgagttgaccctgtcttatctctctgggcacaaagtgcaatgaaagaggctatttacatgacaaacaaactaacgactaatgagggccaaacgtgggcggataatcaacattcgcaaactgctggtcaacgcggtcccgttttaattcaggattattaattgctcgaaaaactcgcgcattttaatcgtgaacggattccagaacgggtcgtgcatgctaaaggcgccggtgctaaaggttacttccaactcactaaggatatgagcgcctacacaaaggcagccattttcagtggtgctggtaagaaaacaccaatgattgcgcgcttctcacaagtagctggtgaagccggctatcccgatacttatcgtgatgtgcgtggatttgcccttaagttctataccgaagaaggcaactatgacattgttggtaataatacgcccgttttctttgttaatgatcctctgaaattccctgatttcattcactcccaaaaacgagattcacgaacacacgcgagaagccaagacatgcagtgggatttctggtcactttcacctgaatcagtccatcaggcgacgattttaatgagtgatcgcgggattcccgctagttatcggatgatgcatggctacggtagtcatacctttaaatgggtgaatgctgctggtgagcagttctgggtaaaataccacttcaagacaaaccaaggcgtccataacttaagtaacgaactggctgccgaattggctggtaaagatacagattatctacaaaatgatttattcgatgcgattgaaacaggcgaccatccaagttggaccgttgccgttcaacttgttccttatgaagctggtttaaactatccgcaagatatctttgatgtgacgaaggtcatttcacaaaaggattaccccttaatcgaaatcggtcaaatggtactcgatgaaaatccaaccaacaactttgaggatatcgaagaattggctttctcacctgctaacttagttcctgggattgaagcttcccctgacaaactcctccagggacggttgttcggttataaagatgctgaacgttaccgtctaggtgccaactatgaacaattacctgttaaccggccaaaagtgcccgtgcataattacgaacgcgacgggatcatggcaaaaaaccaagagacaggcgtcaactatgaacctaatagtgaaaatggtccaaaagaagtcccatctgccaaaattcatggcgaccaacttagcggtcaaaccggtaactatccagccgatcccgattactattcagcagccgataagctttacaacttactaactgatgaagaacaagatcgactaatcgaaaacattcgcttaaatctcggccaagttacaaaacctgaaattcaaatccgcgaagtcaaacagttctaccaagcggatccagaatacggtcgccgagtcgcaacggcattaaatttagatttaaaccaatttgaacactaatctatacaaaaagaaggtatccggcccaccggataccttctttttatttatcttcttttggagaatcttgttttgctgcccattctttcttggtcatcaagtcagagacattcattttaatcttcgtcacgtttaaaccagtcatttgatgtactgatttagcgatgcgttcaattgtttgttcgaagatgtctggcgctgatttaccgtattccaagatggcatccaattcaatcgttacttcttggttatcaatatcagcgtcgacgccctttgtcggatcttcttggtctctgaaacgatcagctaattgactcatcatcccgcctgataattctaagacgccatcgatgtcatgcaccgtttggcccgcaattttttcaatcacaccatccgagaagttcaattctttttcgattttttcggtatgttgatccattgtcttatccatcattttatccattggtttgtttggtttatccatcgttttcatcatcctttactatttttattgaacgcgtttttcagaatcacttttctttggattactgccttgttgttgccattctttcttagtcataatgtcactgacatggctgttaacttcgacaacactcaaaccggtcattgattcgacagcttcagtcactgcagctgttaatcgttcgaaaacatcccgtgcattccggccgtattccaaaataatggtcatgtcgattgcgacctgtttttcgccaacttccacactgatgcccttcgttggatcactatcgtttctaaaacgatccgcaatatcactgaagaaattaccgttcatcgataataagccatcaatgttttgcgctgtcttaccagcaattttggcgattacagcatcttcaaaagtcaatttgctattggccatcacttcatctaaatgtgcttgttctaccattttgtcacacctccgttatttatcctgcttcaagacccggttaacttgtgatctaaatccttctagatcttccttagaccctgttaaactagctgcaatgtagccgagtaaaccagcgatgataatcaagattaaattcataaatccaaaactaatccaaatggctgccaacactgccccaacaacaaagccccaataagaacgtctcatttgtctcacctcacatcactttttgcctgattacttagcggtgatagtttgacattcactgctttaatcggcatctcaaagattgtttgtaatgcttgctgtaccgtttctttaactgcccgtgcttgttgatcgagatcgttgcgatccactgcgaccgcttgaacgtcggcagtcacttttggatgtcggcctttaaacgtcgtatggactaacacttccttaacacggtgtttttcaataatagcttgtgtcactgttttttcaaccgctttgcgggaaagtgctagttcacctttatcggtcttgatgatcatttggcgttttttcggtggactgaataatgccaatagcagtaaatataagaaaattaagccgctaagcactcctaatccaagtccaaaattaccgacccattgttcgggtagccaactaagatgcataaattgcttattggattgttgtagtggatagattaatgtgataaaccacgctacctgacacaacccaagcaaactggctaaactgatcaccactttagttaatttattcatggtgtccgcccctttgtattaggattttctacgtgtgaataataatgaaacaacgaaaacgacaatcacggcaccgataatggatggaattaaggccatcccggcaagctgtggtccccagctgccaaacaatgattggcctagccaggcgccgactaacccaccgacgatattgccgatccaacctgcaggtaaatcacgacttgtcaatgcccccgcaatcaccccaattaaagcgccaataattaaaacccataaccaatgtaacataacaatcatcctttcttgtttccttaaaatatattgctggttctccataaatgtaacaaattcaaccagcatccgtaaaacaatacgcttatcaatattattaaattatcgtaaatgcacttgtttaattaattgattcgccaccggtaacgccgtaaatttgaccggtaatatagcttgctgcgttgcttgctaaaaaaacatatagcggtgctaattccgccggttggccggctctttctagcaatgtattctgcccaaacttaggcaaagccccttccagttgtccttgagccaactgcaacggtgtccaaatcggacctggtgcaaccccgttgacccgaatacctttatccgctaattgttgcgctagattgatcgtaaaattcttgattgctgcttttgttgctgcataatctaacaaatgcggactcggattaaaggcttgcactgaagtggtcgtcagaatactgccgccagccggtaattgagacaatgctgcttgcacaagcgcatacatcgcaaccacattaacgttaaaactatcttgaacttgttctattggtaattcggtaattgatggatgcgcaatttgttgagctgcgtttaagactaatgtgtcaagtgtgccaatttgctgctgcgcggtttccactacttggctagcaatctgtggtttccgaaaatcagctgggatcaatgcgattttacgccctgcatctcgcaccaattgagccacttcttgtgcatccacttcttcacctggcaaatattgcaatgcaatgtctgctccttctcgggcaaacgcaattgcaactgcgcgaccgataccagaatctcctccggtaatcagcactttacgatctagtaaccgttgtgcaccacggtagtgttcttcgccacaatctggcttgggatgcatttgatcttgcaatgccggactaacttgttcttgttcttgaaatggctctgtccgataaagtgttcgcggatcttttaaatctggtttacccatcttcttgttccctcttttccaattaatctagatacactgcttttaaatgttcaatgtcctgcgttgttaatcctaaggcctgttgtaaataggcttgagttgaaccataatcctcattgattatgcgctcagctgcgtttaagtaggactgatcaacactcatcaatgcatgcatactttttaaaaagccgcttgaggcatctttttgacgtagcgtcttaatgcgggctgcaacgtgttccctagatgctgtattcgataatagataatcatattggatcacatcttcaggtgccccgagtgcatttaataaataataagccgccattccggtacggtctttgccacctgtacagtgaaataaaactgcttgttgcggatcggcttcagtcaataatcgttcgaagaattggcgatacattccgattgaatagggatcttgcaccatttctcgatagacttggcgcatttgttgctgcccaccaagcggattattggtgtagcgctcataaagttccgcttcactcgccgtactttgcgtcgcatcttctttaaaaattggcaacgattcgtaagatgccgtcgtaatctttttatctggcgcttttttgcgctccattggtgaacgaaaatccacgacataggtgatatggtagctttccaagagcaccaattctctcttactaagattcgccagattccccgttctgaataatcgatgcggtttaatcgagcgaccatccagtgtttgatagccacctagttctctgaaattgtagccatttttaattggtaatatgcgcgaaaccatcgactcatcctctctaatcaaccactttggctgctaggatcattgattatcatccaatttttgaagacacctttttaccgtcttgttactaaaaacacgaccatgatgatcaaattccaatggcccccagctctcaccgacgagggcctcaccgttattctctcttaaaattgcttcctccaaatcagtcataccttctagaaaacactttagattggctgattctttcttaatcaccaagcacaattctggggtcttgactgtactacgacctaacctaactttcctaattgggacttctttttgcataagtaaccttcctttcatgaaatttttaataacgctacaccatcaatataaaataatcacatttattgatgcaacttttatgattacgctttgttattgttagcacaatcatttacctttacaaagattgttgaagctgtttaaataaaaacagaacacctgaaaggagatggttattatcaacgctattaatatcatatttgccgcagatgaaaactatggtgatcaacttttaatcgccataaagtcggttctaacccatatttcgcccaaaactactattaatttttttattctcgataatgaactcactccgcaaacgaaacacgctgtttccaagcgcgtcccacgacccaatcaagttgagtttattgcacttaataagcagctttttgaaaactgtcctgaaagcaaccacatcaacaaaacggcttactaccgcattttagcgccaactcttttgttgcggaaaaaaatcgaacgtgtcttatatttagatgtcgatatcctcgtacaaactgatctcacgccgctatacaatacgcctttgggcacaaatatcgtaggtgccgtgattgatcctggacaagcactcacactgcgacggctcggcatcactccaccacaatcgaataacatctacttcaattcaggggtcatgctaattgatacggttcggtggaatcatgcatccatcacagagcggactttccacttcatcaatcatcatgcggatcgcttacaattccatgatcaagatgcgctaaatgccactttggttggtaaagtgaaactactccatcctaaatggaacgtacaaaactcattgctctttagaaaacatgcgcctatcaacactgaatatgcccatttatttgatgaagcaatcgccaacccggcaattgttcacttcacaacacacgagaaaccttggaacactctaaaaagtcaccccttcttaaaccaatatcaaaaggaactcaaacaattacatgcgcaacaatccgatataatcaacattgtatcggctgtcaattccgatttcatcgaaacgctggcaattctatacgcctcaattcttaatcacaatgactcacatcgacactatgctttttacgtcttagaagaccacctcaccgcacgagataaagcagtcttacagcatgttgtggctcgatttgatgccgacttgacctttgcagaggtcaacgaatctttactggccaatactgttgaaagtgatcggatcttgaaaacggcgtactatcggattctaattcccgacgtgttccctcacctcgatcgtgcactctacatcgattgcgatgcgctatgcctcacagatttagcccggctatgggatatcgacttaggccaatccttcctcgctgcagtagaagatgctgggttccacgaacgcttagaaaaaatggctatcgattaccaaagtccgcgttactttaactccggtgtgatgttactcaatctcaaaaaatggcgtcaacacaatattgtcagccgtgtactcgacttcatcaatcagcaccctgagaaattacgcttccacgatcaagatgctttaaatgcaattttgcatgatcggtggattcaccttcaccctatgtggaatgcccaaacaaacattttgatgaacaccatcacaccaccaactgaacacctcaaaaaacaattcttagaaacccaaaaagaacctgcgcttgttcacttctgtggtcacgaaaagccatggcatgcctcatcttcccatccattcacaccacaatatcgttactaccggcaacggttcttaaaacaaaaaaagcggctcgttcccttcgccaatcgccgttccctttctcaacaaggataactacaaaaaaagcgggtgcttagacaaatttatttttgtctaagcacccgcttttttaattgctaaaaattatctttttattgaccgactaagccatcatgaatcttatctaggttccacttcatcatcgtatagtaagtgtcaccttgcttccctctttgcgcgagtgagtctgtaaaaattttcgcataaattggtaacccagtttcctgagcaactttttccattgatttcggcgaaacagaactctcaacaaacagatgcttaacatctgaatctgcaatttttgcaagaaccgtcttcatctgttcaggtgtgccttgcgactcagtattaatttcccaaatgtaaaccggtgtgacctgataggccttaccaaaatacttaaaggcgccttctgaagtcaccaagacccgctgattagctggaatatcggcgaatttagtttgcgcatcagtatgcaatttgcgcaaacgtgcagtgtagcgatccgcatttttgcggtaatcatcagcgtgcgctggatctttggtctgcagcgctttcgtaatgttttcaacgtattgaataccgttcgccaaatccaaccatgcgtgtggatcgggttctgtttggttagttgtcaaatgttgcacctgaattcctttgctagcagcgaaaacatccttttcgaattgcttatgcgcgatcttaacaagttttctaaaccaaccattgccacccgtttcgagatttaacccgttatgaaaaatcacatccgcatcagtcgcttttgaaatatccgtcggttgcggttcatattcatgcgggtcagttccccgtttcacaatactgtaaagttcaatgtggtcttgaccaacattatggaccatatcttcaagaatcgaattcgtggtcactacacgtaatttagtctgctggttcgtttgttgttgtttagattgggcgcggtgctggatgaaaccatacacaccacccaccaaaccaaaaactgcaattaacgtcacaatcatttttttcatgctggtcgtcctcctttgcgccacttaaggaaaccttgcttaggcgcgcagatgaatgaaatggcaaagagcacggctgccatcagaacaatcgccggaccagatgcccagttcaatgtgtaactgaagtacaatccactgattgctgacacagcaccaatcccagccgataagaagagcatcgtcactaagcgatccgtccataaaaaggcggtggctgctggggtaatcaacatcgcaacgaccaaaataatcccgaccgtttgtagggctgaaaccgtgactaaggttagcaccaacattaaaccgtaatgtagcacctgcgtttttaacccatatgttttcgcataggtttcatcaaacgaggtaatcaataattctttgtagaagaatgagacgaataagatcactaagcctaagacaatcgccgtactcataatgtcgctatcactgacggcgagaatgttcccgaataaaatatgatgtaagttggttgcactttcggccatcgaaatcaggataaacccaagcgcataaaaggcactaaagacgaccccaatcgaagtatccgtcttaattttactatgtgttgcgacaaagccgattaagaccgccgctaaaataccaaatacagatgcgccaaccagcacattaattcccaacatgtacgccactgcgacacccggtaacaccgcatgtgaaatcgcgtcacccatcaacgacatcccgcgcaaaatgatgaaactcccgacaatgccagacatgatgccgaccattacggcggtcagcaacgcactctgcaagaattcataacgacccaacgcactaataaaagctggaatactcgtcattttgccacctcctgtgcatcaaacaagacagcggataagtccgcactaaaagcacgctcaatgttttgcgcattataaactttttcagttggtccataatcgacgatgccgtggttcatcaccactaaatcatcgaaatattgcgatactttattcaaatcgtgatgaatgacaatgattgttttacccgcatcacgccactgtttcatgattgccatgatcgcggtctcactctgtaaatcaatcccaacaaacggttcatctaaaataataatatccgcttcttggacgatggcgcgtgcaacgaaaactcgctgtaattgtccacctgacaactggccaatttggcgttgcgcaaattcgctgagcgatacttgttcaagtgccgcgcgactggcttgttttgcctttttaaccggatcgcggaataagcctaacttgccatacgtgcccgttagcaccacgtcaaaaacgttaattggaaaatttaaatccaaatctttacgctgttcaacgtatgcgacttgcttctgaactgcgcgcattggtcgatcttgatataaaactgagccttgccgtgccttaaccaaccctaatattgctttaatcagagttgatttgcctgcaccgtttggtccaatgatgccagtgattttgcctgcgtcaaactgaacggcaacatcagtaaatactggtgtgtcatcgtaagcaacggtgaggttcttaactgataacataaagagcctccattcttttaggtaaacctaacttttctcactacagcatacatgattttaatggaattaacaaatattttagtttaggctaacttttcgggatttctgtggaacaatggcttaggatgtttcacgtaaaacataataaaagagtcgcgctatttttaaacagcacgactcttgttattaattagaaatcttcgtcagcatcctcatttgaaacagtgtattgataaatccccttttgaccagatgctaatactttatctgttaatgcatccaatcccaagttgtcacggttgatgaataattcaagtaacatcggtaaattaacacctgatacgagtcgatactgtggcgcatcccgaatgatatcaaccatcacattaaaaggtgtcccacctttaatatcagtcaatacaaaaatttcagatagtggttcaaatgatgcaaaacttttattaatttgttggcgtaaagcttctgtcgtttcccccatttcataagaaacaactgctaaatgcacttgttgcccacaaatcatttcagcagcttgaactagacctctaccagcggcaccatgcgtacaaatcacaactccaatcatctctgttcctccagccattttaatatttcaattgacgatagtaacgtctaatttccattggatggcggttcaagtcttcgatgtgcacatcaattcgatcattgaccgcatgcaagataaatggtgataatgcaccgcggaattctggtgaaatccccggcatgtcgtaatctttcgcatcgataaccgtataattagcacagatttgtgggatgaagttagcaacgcgttggctcaattgtcgttgactatcttctgtcacgtaaattgtgactggtgtatcgcgttcaacaatttcgaacatcccgtggaagaattcttgcgcttcaattgattttgttctgagccaatgttgttcttcccaatagcacattgcatatgaatacgtagcaccccattggttaccagccccaacaaaataatgcatttcatcttcgtgatgtttcagtgcaaattctgtagcaaattcgtccgcatttttataaacagccacaacatcttttgcaaagttatcatccatttgtttgtagaattcgtcgtattgatcgaattcccctgctaaatacataaagcgatcacctaccatgaagaacttaagttgttcattcaatgggtatgaaattaaataatcacacatcgttgctaaatcggcatctacacgatcaacaaacccaattacacgtgcaccaatttcattacatttcttgacagcttcgaccatttcttgcgtatttccagtaactgaagagataatcacaaccgtgtcttttgtcactcggagattgccagttgttaagaacgaagctgcgttttcgtagaatgtttcaatttttgttctttctttcatgtgaacgaccgcttgcatggatgatgcataagtgccaccgatcccaatccaacaaatattactataaccctcatcattaatttgatcgacaattttattaatgtctgatctgagtgcaattccgccttctaagtttgccaataattctttttcgttaaatttcaacatctcaatttccttctttcaattttttatatttttgaatttgtaattgggtcaaaatctggaaaagctgacacttttagattaatttgcttgcgcgctgatgcggtataagccaataagtgaattggaatagtcataaagagtggggctaacaactcatcagttggtaacgctaagccgaggtcgtcttgacgatcaacttggccattcgtaattcggacaaccttcgccactttgccggttaaaaattgttgtaacttagcgactcgctcttgtaacttcccgtttggttcaatgaaaatcacatgatcacttgcgtggagtccaatataagggccgtgcatatactcttcaacttccttaccgagtgcggtaatacgcactgtttctgtaatcttagtttcaccttcacgggccacaccgtatgtgccaccataaccaacaaagattacgcgttgtactgtatcaaacacatcgctataatgcgctacccattctttagcagcatcaatgatgcgtggtaggtcagtcacaatgttttcaatcgctgccaaattcgtttgataactcgcttgatcctgtttacccaattcaagcgccaacaacattaatgtcaaaatcgtggcactatagccagcggtcacatagggcatctcttcaattggcatccctagtggaatcacatgctgacttagcttggcaatcggactgttttcatcaccagtgatggtataaatccggccgttgattgcttgaacccgtttgaccatctcaatcgttgagtagctatgcccaccctgggaaatggcgatatacaacgtatccggttgcaggtgcaacatatagttcgccgtaaaagatggctcctcgacaaaaacaggaatgcccaattgctggctcatataaggctgtgccgcaaacgccgcatttgaactcgatccagttgcaaaaatcacaacatttttatatgccgttgatttgtcattcagtaacgtacgcaatatcgtttgccgattggctaatatatcagcatagattttcggttctgcttcaatgtaatgcaacatatcctgcatgcttgctgcctcctacttcagtagacctgtgtaagcaccaaagattccaattactgcaattaataatagaatccagtgtgctttcaagccttttttatctaaccagaaaataaagagcgtaaagagtaatggcaagatgcctggtacaatcccatcaaaaatactttgaacagtcggcgcacctttacccgcaccaatcgtcaatggcatcttcagcgtcaccattgtcgccaccatcgatccaacaacgcccagccctaagacggaagcgccaaaggagagtttatccattaaacccgttttttgaactttttcgatgaagcccgcaccgatattgtagccaatgaataacccgtaataccgtgctaaaacagccggaatattgaagattaacaggaataacagcggccctagcagattcccttgaagcgctaaggaagtcccaattcctgtcgcaattacccgcaacgtcccccagaagaaggaatcccctaagccacttagcggacccattaacgcaatcttgatattgttaattgcatctgtgtcaaaattttcatctaatgccgcttgttcttccattgctaccgaaatccctaatggaaatgtagaaagccacggcgttacattataaaattccaaatgtcgtttataggcgctcgttaatttttctttactgcctttatagattttatttaacgctggtgtcattgcaaacgagtagcctaaatttgattgtcgttcataattccaggcccattccatcgtgaaggagcgccagaaaaccttcatcaaatcttttttcgagattaaactagaattcttcatcttcataatcgatgcctccattcgttgtacttgcagcaactgtctcgcctttatgtccattattgaaagctgagtagccagttaataccaatgcaagacaagccccaaagatggcaaccccagtaacagggactttcatataaaccgctaaggcaaatcctaatacaaagtaaattgcattgtgtttattgaccattaatttcaacaataacgcaaacccataagctggtaataagccggtcgcaattcctaaaccatcgatgacaaattttggaataaccgctaataatgacttaattactggactcccaacgatgaaagaaattgcaacgattaagccgattggtaaattgattgagaagaacccaccgaacaattgcatccgatccatgccctttgaattaccctcggccgcgtatttatctgccttatgaacaaagtatggcagaacaaagatgaagcacagattcttaataactagcactaacgatgcaatcggaatgcccaatgttaacgcaacggctgtactcttaccggcaccaatggcaaaggccgttcctaaaatactacctgaaataatttctggtggaatcgaagccccgattgaaaatgaccccacaaaggccagttctaaggttgcccccatgataattccggttttcatatcacccataattaatccagcaatggtacacgtcacaagtggtcgcgataacattgatgatccaaataaatattcagcattcgccaacatcgctgttaacgctaataatatggcaatcaatatatggttcatgagtttatcctccttttattctggtagtatcattttcttttcattcggtacttgttggataaagacgtctacaccagatttagaaagcgcttttaattgatcgacttctaaatcggttaagttaaccgccttagaataattcttcgttccttctcgttgttttgtgcccccaacgtttaacaatgtaatcttatcgcccgttcctttgattaatttctccgcatccgctactgattcaacaacaattaacaacttatatttatcggttgcgccagaattaatagcactaatactgtcatcaattgatttcatcactaacttcgcttgttctggcttcgccaagcgaattgctgatttacgaaagtcatcccccgccacactatcattagccactaaaatcgtattaacatctaattcgttaaaccaagaaactgcaacctgtccatgtaataaacggtgatcaattcttaaaaattctatcatgtgaagtcccccttaattaaaatcaatattaaattctgttgtatcagctggttcatagcgattcgaaatcccaatcactttatgattttcagcgtaatactgactgctcaatttaaagagcaacgcatcttcttctagatctaaatatttagcatgcgttgatgccatgctgacgagctgtaaatcttgctgcattccgtagaaattttccttagccgaattgacaagttcgatagtattgaccatctggatatccgcaagactcaaagtcggatataactgctgcggtaaaataatcgtttcgtaaacctgattctttttttcttgataaacatgtttgatggtatacaacaacgcgttgtcactgatatcaaataattccccataatatttatccgctttgcgaagatgaaattctttaatctgttttgctgcgttgcctaagttattattcttcatcacccccgtcatttctaaaatattttgcgaggaaatctggggtttaacgtatacccctacaccgtttttcttgataattagttctttagcaactaaattatctaaggctttccgaattgttgtccgacttgcaccaaataattgctgtaattcagcttcacttggcatcaacatcccacttttaaattcgctacgctgaatgcgagtttcgatttcgtctgaaatggtttcaaataagtattgtttcatcacaaatcaccatcctcacgataatcaaaaatatttttcgcatctaatcggtaacgaatttgattcccaatcagatactggacactatattcaaccggctcatcatcatgatcgtaagccaagcttgttacaatatataatggtgtcttctctggtatttctaatatgatagcctgtttcttatcggcatatcctgctttaatcgtttcatgcccgtagcctaagaccaccccatattgatccttcagtgtttgataaagggaccgattctgaaaagagatctgctcaatttctggaaagcgttcttgacttaaaaaagctaattcgtacgaaatgggtttcccattaatcattcgtttccgcggtagttcaaatacatgatctgccttcaaaaatcgaacaacatcttcttcgactggttcttcggtttgtaagacctcggtttgaatttcgtctggatttaactccgttgacattgaactcattgccagcatgttaatcacatgcttattgttaactgtcattcccacacgtggctttttttcaattagtccttcattttggaggactgataacgagcgccgcattgctgttcgactgataccatatcgctcagccaattctctttccgaaagattagcgaaggctcctttttggatatcgtatcgcaatcgttcctcacccaatgttgcaggtgagatttctttatattccaaagcgatccttcctttcaaattttaaagattaataactcttacaacctaattcactaaattaaaagatatagttttttatatttttaataccaaagtcattgtaagcgcttttttattttgtgtcaatcgttttgaaaaagtttttttaattggcatccattagttgattttgagtattggaaaatgacgttctagataaccagtgcattttaaagtttctaataatttattctcattattgcacattaaatttaatgaatatatttcgtaattggcttaaaaacccgttaaatcggctttaataaggatttttaaagaactacttctctttaacaactacatgcaacagatttgcatatcgataaaaaacttgctaatattaactattatcggtaatgttgttaaatatgtatattaataaccattaattcaaaaacaatattaaccgtagattgtcggccatcactcgtcacataaaggagcgcgagacagttcttaaccgaataatgctaaaaatagtttctgttaggagtgctacctatgaaagatttctttttatccactaagtcaattacgttaatccgtatattagatcatattatccaagccaatgaagcacccatgcttcgggatattatgtatcatttctcactttctaaattaactgcaatttgctacttaaaagagttgcaactagaccttgctgaattagacgccaatattcagctaacaacagtcaataaccgctatgaactcgattatcctgaaggaatgtcttctaacgcgattctttttgaacttcggttcgcttacattattcgaacaaccagctttcaagtgatggacgcgctttttaaacatcattacaattcggttcaaaccttggcagaagcaacaaatttttcgacctcatcagtgcaaaattgtattaaacaattatgcgtctatttcaacaccttctacgtcaccatttcatttagaggtaagcaaaacatcgttggcgatccgttaaacattcgcttgttgatgatttatacttatacatctatttatcgcggtagtgtgactcaggacttcatgacgacacgttcccagtatccaaccgcgcttaaaccacatttaagtttttcgcagcatcatcagattgaagcactggaatcggtcacttattttgatctcattcaaaagaagtattcgatcaccttaaaccctgaacttcaccaactatttgaagcaattaacaagactaatacgattacccttgaattaccaggcttacctgaacagactttgcttgatgaatcactgctgtttagctttttattgcgcattgccgttgctaattacgatacagacaccgaaaaaatcaaaattactgaggctattttggcattaaatactgattttacaaacgatgttaatcacctactattggacttctttgaaacctatcagctgaactacactaaaactagttttctgatttccttttattatttagtcattaccttcatttatctcacctatattactttcgatatcaccgactttgtgatgtttaatgacacggcctcaacgttcaaacaaatcgatattgattcttatcaagaaattgatcatttaaatcaatttttagctgaaaagaaggctcattacacaacattaccagcgaattcaacgggcactctattaagcgaaatgttcttctttttgctcgactacaatccccaaatcaaacccttaaaaattaatatccgatacactaaaaatttctatgcagcgacgatgattaccaaaaatctacaaaatgtgttcaggtcttcaattgtgttcactgattagatcgaagacgcagacctcatcatctctgatcactacgaacatgacgagtctttaaacggacaattcttcttattcagaaataatttcgaaccagacgattgatccttattactgaagaacgtattagcgtatatttatacgaattcttttcataaacgactgaattaaaaaccaccgtactgctaaacagtacggtagtttttgcgttattgattttcaagttgttcttgcaaccattccagattaacttcatgatgccgtttagaattagtcatcatcttgataaacatcggttgcaagtcagccggattggctagtgccgcgtcaatcgcacggattttagcctgtgtctgttcgatttggctttttaacagcttatccatctgttccggtgtcacttgatccgtgaataatagtggtgtgtagaacggaaacgtaatcggcttattctggcgaccataatgggcaaattgttgctcaaaagccgttatgccagcggccgttaattgatagcgattcttttcccgcttatcgggcacgtcgtccgcgactttttcgatcagtgccttttctgccagctgctgcaagttatagtaaaacgagcccttcgtgaagttcacgaaaaaagcgtagtattggctttccatgtcagccaataattcgtaaccatacgcgcccggctttttctttagtaatcccagaattaaaaattgaatcatttactagtctccttgcccgttagctgtgcaataaagtcggcataactcatttgaccaaatgcaaaatcacgactcaatcggtacatcttttcctgctgtgattctgggcgttgatagagttggtctagttgaaccgcttcatctgcaaggacgtcaggaacatcttgatgctgttcgaaagcttggaaataacgaatcccaaaacgccgttgcgaggccgcgtcaatgtgaatcccatctgggttagccgttaattcggcagcgttgaccaaataactgtgtggatcttgcgcgacaacttgcgccatttcgcgattaatttcgttaaattccgtggcgctcgcgccgaaccctactttgcctaaaaaggctggcaattgacccgcaatgattggtaaatcaggttggcccaatgctgcacgtaaatgattgaagaccgccgtcaacttggtcgcatacgtttgatagccaccatttaaactgtcactttcaccttgatgccataacaccccgattaactcactagattcctgtgcaaatttcgcctcagtaatcgcgtgacgcatcaaaagttcgtcgctcgcccactcatcgatggtgctcccaccttccgcgcaggggattaaccccaattcttcatcaggatgagcttgcacccacgccgcagcaaatgacgcagccggcccaacacccgcaacctcccgatcaaaatgaatcggttcggccatcatttgccagcgcccattgcgcagcatcttcacgcgctcgtgccgcaatcccggcacatcttgaataaatccccgcccagccatattcgactgaccgactaataaaattgacttcatcataaaaatcctcctgaaactgatttttatagtacagtctaattagactatgaattcaaaaaattctaggtaactaataacttagttacctagaatctaaataaaaattaaattactctgacaattctgggtgatcatttaaaaattgtgctattggtctcaaaatagttcttgccaattgaactggaacagcattaccaatttgtttatattgtaaattaagtctattatttttttgtactgtactcttccctccatcactaaatgagaaccaatcgggaaacgtctgtatacgcgctacttcccttacactcagtcttctgtttatttcccctgaaaacctccataaatctttttctaccttaaccataggtttcccaccaggccacataggtgcctgtctgccactggcctgaatagtaaaggactgttcatcccaacctttcttcctattacgagacatatacattgatgaaaaaccaccatcatatacatcttctggatctgttggtaaatcccctattgcatcacgtaacgtaacaaacggaatcttattctctccatgagttgggtctggaagattgtagctccagtcatagttgtctttaattttatctttatgcgtgccgattaaaataactcgttctcttaattgtggtacaccataatctcttgaatttacaagatgagcttgtacatcatatcctgcagatgcaaaatcctggactacctgtctaaatacttcaccttttgctagagtcatcagccctttcacattttcggctacaaaaaattctggctgcgtttctaataatgcacgaataaaatgtacatataagaaattccttggatcatcaattaatcgcggtcctgctgcactaaatccaggacacggaaatcctccgaccattatttgacaattaggaaaatttgaaacctgacgtatgtctttactgtgtttaaagataccttcttgaaaattctgaatatatgtttcgtttgcttcagtaaatagatcatttgaatacaccgtattaaaaatactatctttacgaatatcttcaaatgaatttctttctttaagtgcttcatcaacacttatactacctttattaacatctaaaccagcaagttccaatcctaaatccagaccaccagctcccgagaatagactaactacattgaatttcctattcattaatctaatgttctttattagatcatcctcatcgctacttatttgtattttttcacgttcttcattaattttattcaataaaatacttctcacttcatcaggatctaatgttgctgcagatataaacgtactcatacttcagtcctccatatagttcgttattttatggtaacatattatatttaacttggccagttctaatatttgttacataatgtacaggacaatacttttattaataaggggttaattatggcaaatcaatcgttgaatggaaaagctttcgaattcgcatgtctctctgctctaataaaatttatagaacaacctataataattgataaaaccgcacctgcatacatcactgtagaaaaagacttcaattccctttcttccgacgatcaaaaaacaatgattacagctgctaaaaaaggtattcaacaggttatagattatgaaccaaatttatctatagaaaccacacctctacatttatatatccaaactgatagcaaggggaagactggagatgtaagagatattgtttgtataaagcccgaggagaattggcaaattggtatctcttgtaaaaataatcatcatgccgttaaacattctagactatcaccaaaaattgattttggaaaatcttggatgaatgttaaaaatacagatcagtatcgtacagatacactacctgtatggaactttttgaaaaacactatcgaagaaaacccagatacaaaatggtctgaccttaaagaatataaagagacattagtttacgcccctctcctagaggcgttctctaatgaattacggattctatgtaaagatacgcaaaatatcaagaatcttttctattatctattgggttcttatgacttctataaagtaatagccaataaaacaaataaaaatacagaagtaatgatatttaacttatacggtactttgaataaaagcgttaacggcataaaaccaaaacggaaagttcataaaacattactaccttctcgattgtattccatagaacccgcccaagataaaaagggagtcagcccaacaaccatcaaggctgtttttgatgactggagtttaagttttagaatccacaacgcccggactttagtggaaaattcattaaaattcgatattaatttaaaatcagttcctactgatcttcaaaatatcatctctccttgggaataactcattaagcaaacgtcttcatacacataattgatgtataattctaccatcatcttgtcttaactcactttgctcctatcctagtatttggtacataaatttctgaacagttgtgccataattaataaaacaagataggagcattccaatgaaacgatatcaagatgattttaaagccagcattgtgaagatgcatcgtgaagagaaaagatctattcgctcgctttccgaggaatacggtgtttctccagccgcaattcataactgggttaaaggcgctaaatcagttgagctagaagacggtactgaagtaacgtccaaagaattcaaacaacttcaaaaggaaaatcagcgattaaaggaggaacttgaaattttaaaagctgcggcggtgttactgggaaagcattaggacgaattaattgccttgtcttcatagaagatcagttattgcgacaccgcttatcaattattctttcggcactgaaattaccgcgcagcacctattaccattggaaaagatatcaacctagtcaacacgaacgtgttgataatcagctcaaagaaaaaattaaattgatttgggaaaataattatcgtgcctatggttatccacgaataacgatggtgcttcgcaagtcaggcatctgtgttgggtcaaaacgaattttacgattaatgagggaaatggagattcactctttaatgaatcggcgatttaaaaaacctggcactcatgtggatcattcacaacgccccaatttaatcaagcaccagcccaatgcaaggatatggcgtgctgacattacttatttggaattacgtccaggaacctgggtttatctcagttctatttacgaaccaaaggttcatcaagttcttgctttcaagattggtcgtcagatggaggcgacgttagttgtagaaacgattaatcaggcgcttgaatgtcatcaaaagccacaatattttcactctgacatgggttcacagtacaccagcaacgaagttgaaactttacttgaacggcatcagattagccactcatactcaaaacaaggttatccttatgataatgggccaattgaagcttttcactcattgttgaagagagagtttgcctttcaaacaactttttccaattttgaggacttggtaatccgaacctcaaattacatcagttggtttaattccgacagaattagaacgagtgtttagaaaaagatgtgccatttattgacataggagcactttatattatctttcatcggtacaatactaatatgatacttatactttcatctggtatgtgctaaaccgctgtcgcattttactttagacatgataaaaattcctttcgcttttagatttggttagtaaccattctctagtatcgcgaaaggaatttttacgttacagcgtattctaactcccacacctaaaagcaattcaatctttgtatgtccatcctctgtattatataaatgaggctcctatgtcaagaatccggacataaaagtacgaacaaatttgactttcaatttaaattacttaatttaattttcggagcccgaagttttagcgtaaaagcgcgcttgtgaattaatggcggcttgatggccagtgacgagactgtcgacaacggcgacatccgtgccgcgttgaattaattgatcaacggtgtgcgagccgatgtagccggcgccacctaatactaaaactgtcatggttgtttccccctatgtaataaccttgtgtatcaattaacagtatatcatttggactgataaacaaaagcattgattggattattaaacgaaatataataatctttgctataatgggtaagttaatgatttggaagtagcgagggattaatgtggaagcacaatatgaatggcaattaaaagcaacaccaactgaccaagacttacaagcaataatggcagttgaagcactcccgaaagccgcagcccaattgttgtggcaacgaggaatcaaaacacctgaggcaatcagtgcgtttatgcatccgaatgtcggtcaattacatgatccatacgctttgtatgatatgcaaacggcagtcgatcgaatccaagcggctgtgatgggcggcgaaaaaattacagtctacggcgattacgatgccgatgggattacaagtaccgctttgatgcaagagacgctcgaaagtttaggcgccgatgtggaagtatatgtgcccaaccggtttaaagatggctacgggcccaatttagatgtctataagcaactcgttgaaaatgggacccagttgattgtgaccgttgataacggggtgagtggcttagagccaatctcctacgcgcaagaacacggtgtcgatgtagtggtcacagatcaccatgaactaccaagtacattgccaaatgcgacagcaatcattcacccccgtcatccagagggacagtatccctttagtgatttatgtggggttggggtggcatttaaagtcgctacggcattattggaagaaatcccttacgagagtttggacctagtggcgattgggacggtctgtgatttagtgtcactgactgatgaaaatcgcgttttagttagcttaggcttacaacaattacaaaataccagtcgtcccggtttagtggctctttgccagtcagcgggtattgaacaagaaacgcttgacgccacatcgattggatttgggattgggccacgtttgaatgcgattggtcgcttaggtgatgccaacttaggtgttaatctattaacgactttcgatgaagaacaagcggtggaacaggcccaatttgtggaacaacaaaataaaaagcgccagggtcttgtgcaagaaattactgcgctagctagcgaaatggcacaaacacctgagaaccaagctagtgcgaccttagtgttggcacatgaaggctggcatgaaggtgtgctggggattgtggcgagtcatatcgttgaacaaaccggtaagccaactttagtgctagcaattgatctagcaactggccaagccaagggatcgggacgaagtgttgaagcatatcatctctttaaagcgcttgatgcccaacgcacattgttgacgcactttggtgggcatcatatggctgttggcttaacgatgccagtcgatcaattggctgctttacaaacggcgatgaatacttatgccgctgataatcagattgatttaacaacgaaacccacattggcggttgatttacaactcgcattagctgatgtgacgcccgatgtttatcaagccatcagtcaattagctccttatggcacggataacccagaacctttgattgaaatgacggtgccatccgtcaccaatgtgaagcagatcggtgcggatcagaagcatttgaaatttacggcggttgatcaagaagcgcagttagcagtcttagcatttaaccgtggtgcgttgtacgacgatttacaagcggtggaacagttgaaattagttggtcaactaagtgagaatacttggcgcggcaatacgacgttgcaattgatgctgaaagatttacaaacgagtgggcaagtgttaatcgatcaacggagtaatcggttgacgcaacagttgtttaaagctagtggcacctatgtctttttcaatgagaagcatctggcacagctacaaagttatatcccagccggcagccaagccatcttagcagccgatgtcgcacagcaagcagaattgattgtggttgatgaaccaactgatttagatgaatttgaagccttttatcgccaacaacaggccactaaaatcagctttatcttctatagtaagtattcggcatatcttgatggtattcctgataagaaacagtttgcgactttcttggtttacctacgtcaacatccaggaattgaaaaagcacggttaggggaattagcgacttatctaaaaattaaattgccgctattaatttttatgttgcaggtgttttttgacttaggatttgttaaaatagaatgtggtctcatttcggccgcggaacaaccggaaaagcacgcattagaaagtgcaccgagttatcaacaacgattagctaaaattgacatggaaaagcagcttgtttactcaaccttcgcggagatgaaagactggctggcaggattcaatcagtagcaaactgttgaaagagttaaggagcgaatttaaaatggcaatcaactttaaagattacgttgcaagtgtgcccaacttccctgaagaaggtgtcacattccgtgacatctcacctttgatgtctgatggtgaagcatatgcagcagcaaccgacaagatcgtcgaatacgcaaagagtaaaggggtcgaaatgatcgttggccctgaagcccgcggattcatcgtcggctgcccagtagcttacaaattaggcgttggttttgcaccagcccgtaaaaaagggaagttaccacgcgaaaccgtctcagcaagttacggcttggaatacggcgaatcaacattatacatgcacaaagacgcggtcaaacccggtcaaaaagtgttggtcacagatgatttactcgcaacaggcggcacaatcgccgcaaccatcaaaatggttgaagaattaggtgggattgttgtcggaacagcctttttaatcgaactaaacgatttaaacggtcgcgaaaaaattaaagactacgatatcttcaaattaatggattattaatggatgtctttctaagctgggagagtctgagcattaacttaggttggtgaataaccgatgcaatcgggttgtttgcgagacgtggctagacggaagaaattgcatcagaaagcacgttaagaaaaaatgtaacgtcagtcagtcgctaaacgtaaggacctggctgaaggaacatgctaaaaaaggattcgccataacggcgaatccttttttgatagctacattctgtcgcggtataggccaacgaccttacctaagatgctaacttcattcaaaataatgggttcaaatgtatcgttttctggttgtagccgataatgatcaggttccttgaagaatcgtttgcaagttgcttcatcttcagcagtcattgcaatcacgatgtcaccgttatcggcagtcgcttgtttacgaacgatcacttcatcgccgtctaaaattccggcactaatcatactttcgccgcgaatcgtcaacatgaacaaatcttgttcagtttgtagacttggtggaatcgggaaataatcggtcgcttcttcaaccgctaaaatgggcgccccagctgtaacaacaccgagaaccggaatcttcttctgtgatgcaccaattgctgtcaaaccagctgctgttaattcaatggcacgtggtttagtcggatctttttgtaaaaagccttttttctcaaggcgtgctaaatggccatgaacggtagaagtagaggataaattaacggcttcgcaaatttcacgaaccgttggcggataacctttatcttgaacgcggtcatggataaaacgcaagacctctaattgtttggattctgttctcgtcataagagcacctcatttgttctaatagctatatgttagcatacctatagcgggatttcaaacaagcgttcgtgttttttgacattttacggattttagtccaaaatagacaaatagtttgaattggagggcaacaagatggcaatggatcaaaaacgattagaccgaattaatgaattagcacacaaagcaaaagctgaaggactaactgaagctgaaacagcagaacgtcaaacactgcgcgatgcctatttaaaggacttccgcgaaagtttccgctcacaagttgagatgctacaagtgtatgacaaagaaggtaaggaagtcactcctgaaaaagtgaaggatatccaacgggaaaaaggcttgcgtgacgattaatcttagaattccgctttctttttaggttaattatgtgtaaactatttaagtgaactgaattaggaaggggtgcataagatatgggattaggcattttattatttgtcattggggctttattaggcgcagtcgctggtttctttggcgcacgtgcttacatgaagaagtatttccaagacaatccaccaattaacgaagaaatgttaaaggctatgatgatgcaaatgggtcaaaaaccatctgaaaagaaattaaatcagatgatgagctcaatgaaagcacaacaaaaacgtagcaacaaaaaataaaacagtcaagtcggttttaaaagggtttctaacgaacaagtcgtttgttagaagctctttttttatcataataagaacggaaatacaaatgattgtccggcttaattaagattgttataataggacttatcgaattttagaggataggagcacaacatgggaatttttaaaaaactagggtggtattttaaacaagaataccgccgctatttatggggcgtcatctttttagtcctcgtggcgattgtccaaattgtgccaccaaaagtgattgggaccctggttgatttaatggacgccaaacaattaacggcccaaaaattaatcatgtggctcggcgtcttgttaagcgcagcgattttacaatatatttttcgctatggttggcggacccggatttggggtggcgcggctaaactggaacggacattgcggagtcgattgttctggcatttcatgaagatggacacgaccttcttccaaaaacatcggacaggtgacttgatggcacatgccacgaatgatttaaccgcgattcaacaagtggctggtgccggtattttaacctttgccgattcaatcatcactggtgggacaacgattattgcgatggtgattttcgttgactggcgcttaacgttgatggccttgattccaatgcccttgttggccgttgcgtcacgacggttaggtgcacatttacacacagcgtttgggcaatcacaggcggctttttcacggttgaatgataaaacccaagagagtgtctctgggattaaagtcttaaaaacgtttggccaagaagaagctgatattaaagatttcaacgagattgtcacgaagacaattgcgattaataaacgtgtgaatatgattgatggtttatttgatcccgccatcagtttgattatcgggttaacgtacattgtaacaatcatttatggcgggacgttggttatgaatcacagcatttcgattggtcaattgatttcgttcattagttatatcgcggcgcttgtttggccaatgtttgcgattgggcgcttgttcaacgtcttggaacggggcaatgcgagttatgatcgggttgatcaacttttgaaagaaaccagcaccattgtcgaagcaccggatgcgattcaaacactagcaactggcgatattcattatgctgttcaaaaatttacgtaccctggcgacaaacaaccaacgctcaaacaggtggcgttcactctgccacaaggtaaaacgttgggcattgtcggaaaagttggttcgggtaaaaccacactgattaaattattattgcgtgaatatgatcagtatcaaggcgagattcaaattgatggtcacgatatccgggattattcgctggatgcgttacttgatagtatcggctatgtgccacaagataatttcttattttcaacggatgtccgcgacaatattcggtttgctgattttgaccgaaatcaagcggcggttgaaaatgccgcgatttcgagtgcggtgcatgatgatattttaacgtttgtccaaggttatgaaacggtcgttggtgaacgcggtgtgtcgttatctggtgggcaaaaacaacgaattgcgattgcgcgagcgattatgactgatccagaaattctgatcttagatgattcgctatcagccgttgatgcaaagactgaagaagcgattttaatgaatttgaaaacgatgcgggctgatcaaaccaccattatcactgctaatcgcttgagtagtgtgatgcacgccgatgaaatcattgtcatggatgacggtcaaatcaccgaacgtgggacacacgaagcactccttgccgcagatggttggtacgcagagatgtggttgaagcaacaattaagtcaagccttaggaggtgcataagatggccaagcaatatcaatcagaatggtccaagaaagttccattgaaagagcaattgcacatcatgaaacgcctctttggttatacgaaacgctataaacgccaatttatcggcgcaattgtggccgccgcaggtttagcgaccatcaatattttattaccacgattactacaagtctttatggatcgttacttaaccaatcagagtgcgaccacccaagttttaatgggggttgcggcgttgtacggtttaggcgtgattctcaaagccattacacaatttttccaatctttcctttttggaatgggttcggaacgcgcgatggaagatgtccggcgcgatttattccagaagctccatcaactcgggatgcgttatttcgatcagacgccggcaggttcaattgtctcacgagtcacgaatgatacgatgaccttgattgattattggaatgttttcttatccttgttagtcggttcattttcaatcatttcagcgttcattgcgatgtggttaatttcaccaaaaattgcccttgcaacggcagcgtttctaccaatattgttaattgttatctggtattacagtagttacagtgcgcgggtttaccggcatatgcgtgaaaaattgagtcagttgaatacgaaactcaacgaatcaatcgaagggattacgattatccaacaattccgccaggaaaaacggttgaccgacgaattcgaacaagttaacgcggactatttaaaaacgcgcgaagcgatgattcgaacgaactcgttgttgctcgcaccaattgtgaatttactctatacactggcattggtcgttgtcttgagcttgtttggtgtctcagccctgcatagctttgtcacggcgggtttggtttatgcgttcacaacctatgttgggaacttctttaatccgatgaccaatatgatggattctttatcatcattacaagatggaatggtcgctggtcgccgaattttcagaattctcgatcaagaagaatatgcgccagctcaaaatgccgatgctgcaaatgaaattactgagggtcgcgtcgaattcaagcatgtttcgttttcatacgatgggaaaaatgaaattttgcatgacatctcatttgttgttgaacctggacaaactgtcgccttagttgggcataccggttctgggaaaagttcaattattaatgtcatgatgcggttctatgaattttatgaaggtcagattctaatcgacggacatgatattcggagttttcagacagcagaactgcgccgcaagatggggcttgttctacaagatgcattcatgttttatggtgatgtcgcatcaaatattcgattatttaatcaagagattacagatgcccaaattcgcgcagcggctgaattcgtgcaagctgatgactttatcgaacaattacctggtcaatatcatgctcgtgtaattgaaggtggcgcccaattttcaagtggacaacgccaattaatttcgtttgcgcgaacattggttacaaatcctaaaatcttggtcttggacgaagcgacggctaatatcgatacggaaacggaatcgatgattcaaactggtctcgctcggttacgtcaaggacgtacaagtattgccatcgcgcaccgtctatcgacgattcgcgatgctgaattaatcttggttttagatcaagggcagattgtcgaacggggtaatcatgatagcttagtggctcaaaaaggacgttattatgaaatgtatcaactccaaaatggtggcagtgaagaataagcagtttcaaaaaaagacacgactattattattgcggagtaaatcgggaggaatttagcacatgaagaaaagacgctggctgaaatggtcgttaattagcgttgttgtcttagtggtggtagcactatttggtgccactatgtatatgtatcaatacgcatttgtaccggggcaaaaatcatttttaaatggtggtaagccaacgaaagtctatcaagacaatcaacgttggttaaaaaatgttaaacaatcaaagtggcatcaacaatctgccacagatgatttaaaattggcggcaatttatgtgccagcaacaaaacctacgaacaaaacaattttagttgcgcacggctatatgggtaaaaaagaggatatggcacgctatattcacatgtatcacgatcttggctacaacgttctcgcgccggatgaccgtgcagcaggtgaatcggaaggcgatgccattggctatggttggacggatcgcttggattacgtcaagtgggcccaaaaaattgtcgctaccaacggacaggatagtcaaattgcccttttcggggtcagcatgggtggcgcgaccgtcatgtttaccgcgggtgaagaattacctaagcaggtgaaagcggtgattgaagattgtgggtataatagcattgctgacgaactcgcataccaactaaacgatctctttggattgccgaaattcccgttattttacacaacgaattggatggcacgggttcgcgccggctataactttaatgatggcgatactgctaagagtttagctaactcgaaattgccaatcttcatgatccatggcgatcaagataaatttgtaccaaccaaaatggtgtatacaaattacaaagcggcgcatgcgcctaaacaactctgggtggttccgggggcagctcatggtgaagccttggctacagatccaacaacctatcgtaataaagttgcgcaatttttaaatgaatatcttcaataagtctgtttaattgtattttgaagtcgatttggtgtgatagatatataaatatattgatatcgctaatccgttaggtgaggctcctatatgaacaaacgctgctactcagaaacatcgagagatgccaattgagtcaacagaaactgccctgaaggctttttctaatgtagctgaacaaagttctacgtcatatagtgctaaagctcaacgattggaatggcttgtttttcttgtgaggcatcctttctttgaggatgccttttttatgcggatcagctgcgaatgagagggattacgatggctaagacaattaaaatgacactcaatcagattaatcaattaacgccaaaagcgagtttagaacatttcgaaactgacaagaaggggttatcacggcagcaacgaacagcacggttacaaacctatggggaaaatacgattcaaaagcggcaacagcgttcgttattgcgagctagttggcagagcgtgcaagatccgtttatcggcgtattagccgtcttaatgatcatctcctggctcagtcgagatattgatggcgcgatagttatgttaatcatgattgttgtgtctagtagcattcgattcgtgcaagagcgcaagtccgagcaagcgagcattgctttacaagcgatgttggcaaagaccagccgggttgtaattgagggtcaaccaactgaagttgccgcacaaagtctggtacctggggatattgtgcagctgcagacgggggatttggtgaatgctgatttaaaaattctggcgagccatgatttacaaattaatcaatcttctttgacgggtgaatcaaaacccgtgagcaaacgcataacagcgcaagcaactgacgtaacgaatgcggcggatatggcgagtttattgctgatgggtagcaccgttgtcaatgggcaagctaccgcgttagtgattgccacgggtcaagcgacttgctttagcgcaattgtgactactgaacctaagtcgcgaccgaatcaatttgatgcagggttaaaacacatcagttggttattaattcgcatgatgctcgttttggtgccctttgtatttgtgattaatggtgtgactaagggagattggcaacagtcgtttttctttgcgatggcagtggcagttggtttgacaccggagatgttaccgatgatcgtcaatagtaatctggcgaaaggcagtgtcgttttaagtcaacaacaggtcatcgtaaagcagttaaaggccattcagaatctcggggcgatgtcggttttatgtacggataaaacggggacgttgacggaagatcatattaaattgatgtactatgcagatattttaggaaagcgggatgtgcaagttttgcgattagcatatttgaacgccaagggtcaatccggctggcagaaccttctggatgaagcgattattcattactatgaacaagaccaaaccaatgatgactttccatattaaaaattgggcgagattccatttaatttcgagcggcggctaacggtctggctcaaaaaccatgcaggtaatcaattagtgccaaaaggggcctttgaagaagtgctagcaacgtgttcccaagtcaggttagcggatcagattgagccgttgactgaagtgcaaaagcagaacctagtggcagtgcatgatcgtttggcacaacaagggatgcggatgctggcggttgcttatcaagatgagttagcagagacggcatcaattgaccgcgttggtaatcaaggtttgattttcgccggctttttggacccaccaaaacaatcagctatctcggcaattcaacaactacaagctcatcaagtggcggtcaaaattttaacgggtgacagtgctttaacgacgcagcaagttgcccaaaaagtgggcattcaggatctagctgtgaccactggtgagatgttagagacgttaacggatgcacaagtcagtgagctattaaccgagcaagcattatttgccaaattggctccacttcaaaaagcgcgtttaatccgtttattacaagcacaaggggaagtcgtcggtttcatgggcgatggcattaatgatacgacagctttgaaacaagcagatgtcgggatttcagttgataatgccgcagacctcacaaaggatgctagcgatgtaatcctactggaaaaagatttgaacgttttagaacacggggtgcttgaaggacggagagtctttatcaatatgtataagtacattcggattacgttagcttctaatctaggaaatgttttgagcgtgctggttgccagcatctgtttaccatttttaccaatgttgtcactgcaaattcttgtccagaatttactgtatgatgtcgcacaactctggttaccttgggatcgggttgctgaagatcaattgcgccaaccaacacagtgggcaactaaaggcttactgaagagtgcgtttattctaggaccgttgagctcaatggttgatatcttaacgtttgcgattctctggtttggatttggcctgcaaacatcagctcaacagggggctttccaagcgagttggttcgtcgttggtttattgacgcagatgctagtggtttatgtattacggacaccagcatcaccgttcaaggatcgcgcaaattggcgtgtttacttggggagtttaatcagtttgttaattggaggtattctggtattgacatcgctcagacaagccgttgatttccaagcgattccaacacaatttggctggattgcagtggcattagttacggcctatctattggtgacgaatgcggttaagaatttaacgcgctaaaaaaactgctagatgatatcatctagcagttttttgttattattttttatcaggtagttcatatttaaaatcagggttaatttcgtggtcaatttgatcaaatgcggcttgcatttgatgattgacaacttctaagttttcttcgttgagttttaatttcggatcgattgggattggttcaccaaaacgaatcgtaatctttttccgttttaaaacatcagagaattttaatggcccttggtagactgctggtacgagtgggacccgcgccatcttggcaattacgaccgcgccgcctttaagttcgcttgaatagcgactaccagtggggaacatgattaacgaaagttcttttgagcggagggctttcactggtgttttaatcgccgatgggccaggatttgttcggttcacaggaaatgcgtttgcgtgggttaagatgaagcgtagaattgggtttttaaagagttcttctttggccatgaacgtgaactttcggggactagcagcaagtgcgaagaagattggatcccaccaagttcggtgcgggccaactaaaacataagtcccttcaggcagggcttctttattttcgaccttcaaattgccattcaataaccaggctaaaatgcggacgataaaacgtgcaaatgagaaaaacatagtttagattcctttcaaacgtgactagtatctgctcattataccaaataatgatactctttgttataatatgcctaaatacaaatgaggttgaaggtagaacgatgttaaaagcagatgagcgaattgaccaattatttcgcttagatattcagattattcaaagcccatccgtcttttcctattcgatggatgcggtgttgttagccgacttttcccagttaccaaaacgcgggacgattgtcgatttgtgcgcaggcaatggggcggttggattattcatgagtcccaaaacaaatggtcaaattatcggtgttgaacttcaagaacggttggccgacatggcacaacggtcaattgaattaaatgacttaaccgaccaggtgacaatgctcaatatggatttgaaagacgttaacactaagattcataaggacagcgtcgatattgtgacctgtaatccaccatattttaaggttgaacccaatagtcaaaaaaatcccaatcaacatctggcactggcgcggcatgagattgcaacggacttacgcactgtggttcaaaccatgagtggcctgttaaagatgaatggtaaagggtatttagtccaccgtcccgaacggttcttagaaatctgtgacgaactacgcgccgcacgcatggaacccaaacgcgtccggtttgtttatcccaaagcaggcaaagaagcgaatatggtgttaattgaagcggtcaaagatggtaaaaaagggggcttacgaatgcttccggaactgacgatttatgaccaagacagccactatacaccagagatgcgcacgaagttattcatggctgacaatgactgagaaggcttattatttttacgtattagtctgcgccgatcatagtttttatggggggttcacgaccgacgttaccaaacgcgttgccacgcacaatgctggcaaaggtgcgaagtacacaaaattgcgccgaccagtgcggttattatattttgaaacgtttagtgataaatcggcggcgcttaaagcagagtatgcgttcaaacatcaaccccgccgcaaaaaagaacaatatttaatggaacatggcatttcaagaactcaattttagaatggagagaccaatatgcaacctaagttagttgtcgatcaacacattcatttacaacctgtgacggaagcggatgcgccggcgttatttcagttagtggatcaaaatcgcgtcaatctcgatacttggttaccatgggtgggcgatatcgaatcagtggccgatgaacttggctttttaaaatatgcgcaacaacaaatggcaaaccaggaactttggatggcaacgatttgggatgaccaccagttagttggtacgattgatgtccacaatattgacgacttgaatcgtgcgggtgaagttggctattggttagatgaagctttccgcggacgaggtgtcatgcatcgcgcactagccgccattgaacaatacgcggccagtgaattggaacttgaccagttgagtatcattgctgcacacgaaaacgtggcgagtcagcaagtcgcgctaaaagcgggctatcgagcggttgaaacagtgagtggcgttacctcagtgagccaccaaccacaagatgcaacccgttatcagaaacaattgggcggcatgtaagttcttgttgacgcgccttgttatttttagtatacttttaaacggtatttcaataccaaaaaataattcacactggttgatttctagagaggtgcttggcgacaagttctctaaaaaagtgaaaccagtggtcgaaaaaaaccatatggaggtctgttgacatggctgtattgtcaatgaaacaattattagaagcgggtgttcacttcggtcaccaaacacgtcgttggaacccaaaaatgaagaaatttatctttactgaaagaaatggtatctacatcatcgacttgcaaaagacagttcgcatggttgacgatgcttatgacttcgttaaagaagaagctgctaacgaaggtgtattcttattcgttggtactaagaaacaagcacaagatgcaattgctgaagaatcagtacgtgcaggccaatactttgtaaaccaccgttggttaggtgggactttgactaactgggacacaatccaaaaacggatcaaacgtcttaaagaaatcaaagcaatggacgaagatggtacattcgatcgtttacctaagaaagaagttgccttgttgaagaaacaacaagaaaaacttgaaaaattcttaggcggtatcgaagatatgcctcgcatcccagacgtaatgttcgttgttgatcctcgtaaagaacgcattgctatcaaggaagcacaaaaattaaatatcccagtcgttgctatggttgatactaactcagatcctgatgatattgatgttattatcccatcaaacgatgacgctatccgcgctgttcgtttaatcacagctaaaatggctgatgctatcatcgaaggccgtcaaggtgaagatgatgttgaagaagctacatttgctgcagaaaacaaatcagcagactcaatggaagaaatcgttgaagcagttgaaggcgacaacgatactaacactgacgctaaatagtagattcaaataagctgtcttagaggtttcgcaaatactgcctgacttgtgggacagctttttttaaaccaattatattgaatataaattgtcggaggtatgaattatggctgaaattaaagctgctcaagtaatggaattacgtaagaaaactggcgttgggatcatggacgctaaaaaagcccttgtagaaagtaacggcgacgttgctcaagcaatcgatgctttacgtgaaaaagggatggcaaaggctgctaagaagagcgaccgcattgctgctgaaggtttagcaggcatcgccatcgatggtaacactgctgcaatcgttgaagtgaactcagaaactgacttcgttgcttcaaacgatcaattcaaagctttattgaaagatattgctgaaacaatcgctaaaaacaaaccagctgacatggcagctgcagaagcattaccaatgggcgaaggcacaattgctagctcagtaatcaacttaactgctgttatcggcgaaaagatcagcttccgtcgtttcgaattagttgaaaaaaatgatggcgatcactttggcgcatacctacacaatggtggccaaatcgcttcattagttactttagaaggtgctgacgatgaagcagctcatgacgttgcaatgcacgtttcagctgttaaccctcaatacgtttctcgtgaagatgttcctgctgaaacattggatcacgaacgtgaagtattaactgaagaaacaaagaacgaaggcaaaccagaaaacatcattcctaagatcgttgaaggccgtgttaacaagttcttgtcagaaatcagcttgaacgaccaagctttcatcaaagactcagatcaaactgttgcacaatttgttgcatctaagaacggtagcgttaaaggtttcgttcgtttcacagttggtgaagggatcgagaaaaaagaaaataactttgttgatgaagtcatgggccaaatcaaataagcttattttgcttcaaaaagggaacgcaatttgcgctccttttttttgcagttttacgataattcagaatcgcatacccaaataacttattaaatatggtaaaatgagcctagtaatcaacggagggatatcaaacatgtcaaatacaaaatacaaacgcatcgtcttaaaagtgagtggtgaagcacttgctggcgaccaaggtttcggaattaaccctgaaattgttaaagtagtcgcaaacgaaatcaaatcagttcacgatttaggggttcaaattgccattgtctgtggcggtgggaacatctggcgtggtgtgactggtgaacaaatgggcatggaacgtgcgcaagccgattatatgggcatgatggcaacggtcatgaatgctttagctttacaagataacttagagagcattggtgtcccaacgcgtgtgcaaacatcaattgaaatgcgtcaaatcgcagaaccttatatccgtcggaaggctgttcgtcatttagaaaaaggccgcgttgtgatttttgctggtgggacagggaacccttacttctcaacagatacaacggctgcattacgagctgctgaaattgatgcagatgtgatcttgatggctaagaacaacgttgatggtgtttactctgctgatcctaacactgattcaagtgccgttaaattcgacacattaacacatttagatattatcaacaaaggcttgcaagtgatggattcaactgcaagtactttatcaatggacaatgatatcccattggtagtcttcaacttaaacgaaccaaacaatatcaaaaaagttgttgaaggtgccaacatcgggacaacgatcgaaggaggagaataatatggcaaatccaattttagatgaagcaaaagcaagcatggaaaaagcagaagcttcattacaaagaacattaggccaaattcgtgctggtcgcgcgaatgcaagcttggtcaaccgcgtgaatgttgagtattacggtgcaatgacaccacttaaccaaatcgccgcaattacagtcccagaagcacgggtcttgttgattaccccttatgacaagggtgcgcttgaagatatcgaaaaagctctttatacagctgatttagggatttcaccagccaacgatggctcagtaatccgtttagtaattccacaattaactggtgaacgtcggaaggaaattgctaaagaagttggtaaagaagctgaaatcggcaaagttgccatcagaaatgcacgtcgtgatgcaatggacagcttgaaaaaagctgaaaaagcaagcgagattagtgaagatgaaatgcatgatttagaagaacaagttcaaaaattgacgaatgaagcaacgaagaagattgacgaaatcgccaagaacaaagaaaaagaaatcacagaaggttaatccctaatggatgcaaaaagccccgccacaacagtggcggggctttttttgcgttaatgaataattttactcttcgtcgcttctttgtggagtttttcaaagaatggattgattcgatctttcaggaagaggccaattaggaagaaaacaaccgcaaagagcgctaggatgataaagttatgccagaggttcggtgcgtaaatcccaccagttggttcgcgtaagaggttgaccccgtatgtgaacggtaaaatggggttaataaactggaagaattgatcggagaggacaactgggaagttcccgccaccgccagagatggaaagcaccaagacaatcatcgcaattcctttaccaacgttcccgaacatcgcggcgagaacgtaaacaattgtcatgaagaccatgctcaggaagacggctaataagattagcggtagtttatcaacgatgtaggccttcaataagaaaatattaccaagcgtcacaatcacggcttgggcgacaccaatgacgatgtaggttagccagcgagcaataaattgctgtttcttagtgtactgtttcttttgtttgtcgtctaacgcgaagttggttaagacgatgttactcaaaagaagtgcaccaacccagagacaaagggctgtgtagaacggcgcacttgctgagccataggtcttaatcgggtagacgtgtttttctttcagttcaaccggtttggctaagaaattactttccttagttgcatcgcggcgaagcaatttaatcagatctttgagatcgaccgtcttttgttgtttgcgaatcgcctcagcgcctttttggatcccgctacgtaagaatggccaatcattgttgatgaggtcggtcgcatcatttaaggcggttttaacgagtgggaatttctcgttggccatgttgagcgtcgttgttaagtcgttttcgatgcctggtaagtcattgttgatgaaactggttgccagttgcagtttatttttgagtagtgggtagtcattctggtaaacgtcagaagcggtgtttaatccagagataatcgtgcccagattgccatttaataatgtattcgcgtcatgaatttcttgtttcaacgctggtaactgctgagcatatttttgcagatagtcgatggcttgttggagcgtcttttgtgtgttgaataagagtgcggggagtttcggtaaaacttcgccgttaagctgtgttaagacggcgttaccgctagcaattaatgttgaaaagcggtcgagcatatttttgacgctgtcaccgatatgggccgcttgaatcttagcgacgctgtcttcgacttggtcggcgtattgaatcaaaccattaatcttggtttgcaaatcgtcaattgataaatcatcgtaatgggcgagaaggtcatcaacttggcctttaaaaacgccgagttgggtcgccaacgtatttaaatgtttaatcggtgtatcaagtgcatgtgattccggttgaccattcgccactgctgactgattgtagctgtcttgcaagttttggagggttgtcgcaagttgagtcgcatgggtttgcaaggtagcggtgtgatcagataagttctggagcgcttctttgagcgcttgcttgagttcagcattattgggatcctctttgagttgactcagcaaactattgacggccgttaaattagttgaaatgttagttgccaattgattggtaatggctaacccttgatccaccgttttttgaatgaccggtaaagcagcttggagtttagggattaggtctgattgtaattgacccgcgacaccttgggccgtttggctaaaagtcattaagtccggtaagactttttgtgttttgtttaacacatctaaaccagtttgagcttcgttaatgccgttcgttaaagtattggcgatgccatcgaaatcagaatcgagtgtggcaacttgtttgccagcactttggatttctggaatcttagcctgaactttcgttgcgagctgaccggctgcttcaacttgtggtaagtattgattgatgccgactactttttgcgccatggcatttgcttgtggtaaaaaggccgcgaactcgttggcttgggcaagctttaatgccatttccggtagtttcttttgtagattaagcacttgttctgcgtattggttaatttctggaatttgttggtctgttttgagaatgaggctcgagaaacgattaatgacggggagatttgtattgagatcaatcccggccttgtttagggtactcatcaatgttttaccaacggttgagacgaattcttctgaaatggtggactgaagcgtagttgcacctgcactggtaattttaggcgcaatcgcgttaatcttatcattagatgagtagactatctttggcttttgaatcttgccatcgacgaaactaacgagatcctttgagaagtttttgggcacgtaaatcccggcgtagtatttccccgtttttacgccgtcatctaattcttttttgctcgaagtaaattgccagcctaatttgtcgtttttctttaattggctaattagttcggcgccaatctcgacttttttgtcagcaatgacaacactttgatcggctgagtaaacagcgacttttaagtcttgcgttttactataagggtcccataacgcccagatattaaaccacgcgtagagcgatggaatgataatgagggcaataattaatagaagagcgatcgggcttttgaagattcgacgccaatcaagtcgaaagagttcgaaggtttttcgcataataaactccctttttctgtttaaggtatgtatcagtttatcatatttaacctgttacatgccaataactataggaatctactaatatttaacaataaatttcaatgtgatagcggcaacagtacgttgtggcgggaatcgttggtattaaaggcttaatcgtggataaaaatcatctgggaagaactcaaaaagcgcagaatgggcggttcagtttgtacaatgccggtgacaatcggttgattttaaatagtcacttcctgtgatttttggtacaatcatatgagagttattgaaactggaggagtatgtggtgtttacaaataaaaaaacagacgcacaacaactagatcccaccaacatccccaaccacgttgccatcatcatggatggtaacggtcggtgggcgaagaaacgcttaatgccaagaatcgctgggcataaagcaggaatggaaaacgttaagacgattaccaaaacggccagtcgaatgggtgttaaagtcttaacgttgtacgctttttcaactgaaaactggaagcgtccaaatgacgaagtgaacttcttgatgcagttaccggtcgatttttttgatacgttcatgccggaattgattgctgaaaacgtccgtgtgaaagtcatgggtaatattcaagaattaccagaaaagacgcaaaaagcggctaacaatgcgatggccgatacggctgataacacagggatgattttgaactttgcactcaattatgggtcgcgtgacgaaatccaacaagcggttaagcagattgctaaagatgcggtaaatggtacaattgaggtcgatgcaatcgacgatgcgttgattagtgattacttgatgactggctttttaggggaatatgctgacccagaattattgattcggacgagtggcgaagagcgaatttcgaacttcttactctggcaaattgcttacagcgaacttgttttcgtagatgaattctggccagactttaccccagcagtgtttgaacgctcagtcggcgcttaccaaaaacgtaatcgtcgttttggcggtcttaaataggaggaaatacaattatgaaacaacgtgtcattacagcaacaattgctttaatcatctttatccccatcattttctttggtggtatttacattgatatcgcggcagccgttttagcactcgttgccttatcagaagttttcatcatgcgtaaacgaattattgtctcacctgatgcaaccattgccggactagcggtgttaagtttagcctcacccaaaggcgcctttaactggttaccagcaggtgtgtcacaatttgatttattctacttcttcgttgccattttattagccatcacagtcttcacgaaaaaccgggttaacttcgatgatatgggtgtcacaaccttagccagtctctatatcggcttaggcttccattatttagccgcaacgcgaaatattggtggttttgacacggtgatgtatatcttattggtcatctggatgacagatatcggtgcctacacattcggacggatgtttggtaagaataaaatgtggccagctatcagccccaataaaacttgggaaggttcaattggcgggacattatcagcattagtggtcgcagctatttatttaaacttcttcccacaagcttattcaatgcctgtcatgttaggtttaacgttgatcttctcaattgccggtcaattaggcgatttagtcgaatcagcttacaaacgctattatggcgttaaagactcaggtaaaatcttaccaggtcacggcggcatcttagatcgctttgacagcatgttgtttgtcttaccgctactacacttgtttggcatgatttagagtgcgtttgtggcggttagcaactgagcattaatacaaaaattcgaataatcccggttttaggattatttgaaattttagattaagcggaagttgttgcaaccaaaaagcacgtttttaaaagtcaatattatctagcgtttagcgcaactttttggtttgcgctaaacgcttttcttgtttctaaggaattcgtgatataatataacagttcatatcaaatgagagtattgaaatacgcatttagaagggagtcgtactctattggcggcgattattgcgtttattatcatatttggcattttagtagtggtgcatgaatttggccacttttacatggcgaaacgttctggtattttggtgcgtgaattttcaattggcatggggcccaaattatttgcaacgcgcaaaaatggcacgacttatacgattcgttggttaccacttggcggctatgtccgcatggcggggatggcggatgatgaatctgaaatcgaagccggcacgcaagcaaccttgctgttagacgaacaagaaactgttcaaaaaattaatacaagtgacaaagtaaccacgttaaacggtgtcccatttcaaattgcaaaaactgacttgcaaaaagaattatggattgaaggctatgaaagtggtgacgaatccgaattaaagcgttattcggtcagtcacgatgcaacgattgttgaatcagacggaacggaagtgcaaatcgcacccgtggatgttcaattccagtcggctagtttaatcaatcggatgttgaccaacttcgcagggccgttcaacaactttatccttgcgattgtggcgtttgcgctctttgcttttttaaacggtggcgtcccacaaaacaaagcgattgttggcacagtgatgccaaactcgccagcacaaaaagccgggcttaaaacggatgaccggttagtgaaagttgctggcaaaaaagtcacgacgtttactgatttcagctcggtgattgcaaaatatccgaataaaccagtgaatgtccaggttaaacgggcaaagcaaactaagtcactcgaaatcacacctaaagcggtgaaagtcgaggggcaaaaggggaaagtcggccaaattggtgtgacagctggactcaaccatagcgtgggggctaagttgaaatatggcttcacccaatcatgggcgaatgcgacccagatttttaaaattctcgggtcattcttaacgggtggtttctcactcaataaactagccggaccagtcggcatgtattcaatgacgacccaattcgcgagtcaaggctttacaatgctcgtctacttcttagcgttcttatccgtcaacttggggattatgaacctgattccaattccggccctcgatggtggtaagctcgtgatcaacgtgattgaagcgattcgcggtaaacccatctcaccggaaaaagaaggcattgtcacccttgtcggggtcggcatgatggtcgtcttaatggtcttggtcacatggaacgatattcaacgctttttcttttagattatttttggaggtataacagattatgaaacagtcaaaattatttatcccaactttaaaggaagtgcctaactcggccgaggctaagagccatcggatgatgttacgggccggctatattcaccaagtatctgctggtgtttacagttacttacctttagcattccgcgtcttggaaaacatccaagccatcatcaaagatgaaatgagcaagattgacgccgttcaaatgcaaatgccagggattttacctgctgaattgtgggaagaatcaggtcgttacgaaacctatggcgataacttattcaagttcaaggaccgtcatggccgcgacttcatcttaggcccaacacacgaagaaactttcgctgacttggtgcgcaatgaaattaagtcatacaaaaaattaccattaacgttatatcaaatccaaacgaagtatcgtgacgaagatcgtccacgttacggtttattacgcggccgtgaattcatcatgcaagatgcttattcattttcagccaatgaaactgatttggatacaactttccgccaaatgtaccaagcttacaccaacatttttgaacgctgtgggttagacttccgcgcaatcgttggggatgccggtgccatgggtggtaaggattcaatggaattttctgcgattgctgaaattggggaagatacgattgtttattcagaccaaagtgattatgctgccaaccttgaaatggcaacgagtgtccgtcctaagcaaaactcaagtgatgtgcaattagagcttgaaaaagtagcgactggcgatgcccacacaattgaagaagtggctgctaaattagacgtcccagcgcaacaaatcatcaagagtgttctctttatcgctgacgaccaaccggtcttggtcttagtgcgtggcgattttgaagttaatgatgtgaagttgaagaacttcttagatgctgatttcttagaaatggcaaccccagaacaagtcttagcaacaatgaacgcaccaatgggttcaatcggaccagttaacgcgccagaagacttacaaatcgttgctgattacagtgtcgaagccatggtgaatgccgtggttggggcgaatgaagccgatcaccatttcacgaatgtcaacagcaagcgcgactttaccgtagctgattattcagacctacgtttcgttcaagaaggcgaaacatcacctgatggtcaagggaacttgcactttacaaaggggattgaaattgggcatatcttcaaactaggcacacgttacactgaacaattcggtgccactttcttagatgaaaatggccgtgcgaaaccaattatcatgggttcttacggaatcggtgtgagtcgcctcttatcagcgattacggaacaacaagctgacgaaaacggcttagtttggccaagcgcgattgccccttatgacttgcatgtcgtaccggtcaatgtcaaagatgctgaccaagtcttattagctgaacagatcgaaaacttacttgaagaagcaggttactcagtcttagttgatgatcgtaaagaacgggctggcgttaagtttgccgacagtgacttaatcggcttaccaatccgcatcacagttggtaaaaaagcagcagaggaaatcgtcgaagttaaattacgtaagacgggtgaaaccctagaagtgaagaaggatgaattgattaattcattaagtatcctattggcttcagagacaacagaagctgaatagagtgcgttcaagctcggtcaacttttgagcattagcacagggaagcgaattaacgacgcagtcgataatttgattcccagcgctaagcgcagaaagttagcttgaaaagcacgtttaggaatagagtgcgtttgaaaccgtttggctccaagcattaacttaaattcgtgaatgagcgacaacgtcgatcgttcgcggattgtagttaagcgcaagaggcagtttcaaaaagcacgtttacattataaatgttcggacatctaaaaagggctgagacagaatgatatttgtcctagccccttttatttaactttctgaatatgaggaggcccttttgtggcattagatcaaaccgcactgtttcaaaaattattagaacaaattgatttacccgcggatgttgcgaattatcctggcttcaaaactggccaagtagaacaagtcgttgtccacgaaacatccaaacgctggacttttaaattacatttcgaatccgttttgccatatgctgtttacacaacgtttgaacagtatctagaagcagcattcaaagcgattgcgggtgtttcagtggaaatcaccaccgatgcaactgaattggacggcggtgttttagcagcttattgggaatacgtcattaaccatagtgggattcaatcttcaatgttgcacgaattgtgtgaaaaagagaccccctatatcgacggtcgcaacgtctttttagttgtcgaaaacgacatcgtgaagacgttcttcttaaatcaagcgcaaacgacaatccaagctggttatcaacggcttggttttcccaagtttgcgattcaacccttgattgacgaatccgcctcacaaaaggcaatcgaagattttcaagcgaagaaggctgaacaagatgcagcccgcgcacaagcggcagccgaagcgatcaagaaaaatgaagcactcaaagaaaaacgtcaatcagaaggcaaaccagtcgatggcccgatttcaatgggccgcggcttaaatcctgctgaaccaacccgtcagatgattacaatcaatgaagaagaacgttccgttgtcattgaagggttcgtctttgataaagaagtccgcgttttacgttctggccgccagctcttgattttgaagatgacagattactcatcatcatttacggtcaagaaattctcccgggataacggcgacgaaagtatcttcgcagccatcgataaaggcatgtggttcaaggtgcgcgggagtgttcaagaagataacttcatgcgcgatctcgtggtcaatgccaatgatttggtcgaagttagccatcccaaacgccaagataccgctgaaaatggcaagcgcgtcgaactgcatttgcacaccaatatgtcacaaatggatgcgaccaacaagattggcgacttcgttcaacaagccgctaaatggggccaatccgcgattgcggtgaccgatcattataacttacaagctttcccagatgcttatgcagcagggaagaagaacggcgttaagattttgtacggtgtcgaagtcaatttagtcaacgatggcacgccagtcgcgtataacttgcgcgatgaagcactcgaccatgctgaatacgtgattttcgatgtggaaacgactggattgtcagccgtttacgattcgattatcgaattggccgctgtcaaaatgaaagatggcgaagtgattggctcgttcgatgaatttattgatcccggtcacccgctatcagctttcaccacgcaattgacgagtatcaccaatgaaatggtgcacggtgctaagaaagaagccgaagtcctagcgttgttcaaagaattcgcgggcgatgctgtcttagctgggcataacgtcacgtttgatatgggctttatcaatgctggctatggtcgtaacgacctcggtcagattgaaaatcccgtcatcgatacgttggaagtttctcggatgcttcatccagaatacaaaaatcataaactcgatacgttaaccaagcggtataaaattaacttggaacaccatcatcgtgctaacgccgatgctgaatcaaccggttatttgttatacaaattagaagccgaagcggccgacatgtatgggatggtcaacgtcaatcaactgaatgatcgcgttgggattggcgatgcgtataaacaagcacggccagcgcatgcgattttaatggcgcaaacccaagctgggttgaagaacttatttaaactggtttcagcatcgatgaccgaatactattatcgcacgccgcgtttgccaaagagtcgcttggatgccttacgtgaaggcattctagtcggttcagcttgtgccagcggtgaagtcttcgaagcgatgatgcaaaaaggctaccaagaagcacgcgatcgcgcgaagtattacgattacctcgaagtaatgccaaaagccgtttacgcaccattattagaacgtgaattagttcgcgataatcgggcgcttgaagaaatcattcgcaacatggtcaaactcggtgctgaattggataaaccagtggttgcaactggggatacacattatttgaatccagaagattcaatctatcggaagattttgattcactcaatgggtggggctaatccattgaaccggtcacaattaccggatgttcatttccgatcaaccgatgaaatgttgacagcgttcaattttcttggtgccgatattgcccaagaactcgtggtgacgaacccgaaccaaatcgccgatatgattgatgaaatcacaccggtcaaagataagttgtacacgccgaagatggcgggtgccgaagatgaaattcaaaccttaacgatgaatcgtgcgcatgaattatacggggatgaactccctgaaatcgtgcaggcccgccttgataaggaattgaagagtatcatcgggaacgggttctccgttatctacctgatttcgcaaaagctcgtgtataagagtggtaaggatgggtacttggttggttcccgggggtccgttgggtcgagtttagtcgcaacgatgaccgggattaccgaagttaatccattgccgccacattatcgctgtcccaactgtcattactccgaattttataccaaaggggaagtcggttcgggttacgatttagccgataaggactgccctgaatgtgggacaccacttgataaagacggccatgatattccatttgaaaccttccttggcttccacggggataaagtgcccgatatcgatttgaacttctccggtgattaccaaccggttgcgcataactacaccaaagtcttgttcggggaaaataacgtgttccgcgctgggacgatcgggacggttgctgataaaactgcctacggctatgtcaaagcctacgaacgtgataccgaacaaactttccgcggcgcagaagtcgatcgtcttgccaaaggctcaacaggcgttaaacgaacgaccggtcaacatccggccggaatcattgttgtgccggattacatggacatctatgatttcacaccaatccaattcccagctgacgatcaagatgcagcctggaagacaacccattttgatttccattcgatccatgataatatcttaaaactcgatatcctgggccatgatgatccgaccatgatccggatgctgcaagatttatcggggattgatcccaagacgattccaaccgatgatcctggtgtgatggccttgttctccggcactgattcactcggggtaacgccagagcagattaattcgaaaatgggcacgctcggtgtaccagaattcgggacgcggtttgtccgcggaatgctcgaagaaacgcaccccacgacgttctcagaattactgcaaatttctggtctttctcatggaaccgacgtgtggttgggtaatgccgaagaactgattaacaaaggcgttgtcactctaaaagacgttatcggttgtcgtgataacatcatgatggatttaattcactggggtatggatgatagcatgtcgtttaacatcatggaacgggttcgtaagggtaaagggattccggatgactggcaacaagccatgcgcgacaacgaaaatgtgccagactggtacatcgattcctgcctaaaaattaagtacatgttccccaaggcccatgcgaccgcctatattctaatggcgttgcggattgcttacttcaaagtttacttcccaattatctattactgtgcttacttcagtgtgcgtgccgaagatttcgacctcgtggccatggcccaaggaaaagaaggcgtcaaggcccgcatgaaggaaatcaccgataaagggatggaagccagcgccaaggaaaagaatttgttgacggtcctcgaaatcgccaacgaatgtttggaacgtggcattaacatcaagatggtcgacattgaaaaatcagattcatctgacttcttgatccaagacgatcacaccttactcgcaccattccgcgccgtcccaagtttgggcggtaacgtcgccaaacaaatcgtttccgcccgcgaagaaaagccattcttatccaaagaagacttatccaaccgtgggaaagtttccaagacactgatcgaatacctaacagaaaataacgtattgaatgacctgcctgatgaaaatcagttatcgttgtttgatatgatgtaaaaaagccttcatactttcactgaaaataaattttcggagaagtatgaaggctttttattttgcacacattttatgcaattttaaaaaattacataaaatttgttgaataaacttttgattcgacgtatactaagcatattaaataagtgttgaaggaggatttaatggagaaacttagtaagtttgttgaatttgtgagtggctctccacaatctcgtctatttgtttcaatgaatgaaagtgatcccagttattgtatttatgggcaatctgaattgaaagctgatttagttcagtcagaaacatcgtccaatgagggacgtcaaattcggacccctgataaagttatgattttatcagaaggcgatattatttttaatttagtttctggagaagcaagtgttgttggaaaaaagcatgttggctatctacaaactcaaaattttattaaattaatccctaatcaggatttggatactcactatttagttttcttgttgaatcaggatcacaatattaaaagacagcttgtaagttcattacaaggaacgatggttattaaatatacacttgcacagctaaaagcgttgagaattaataaactaccaccaatagatgagcaacgattaattggaagaatgtatttcaaccaaatacgattaaactggtttagaaagcaaagtgcggatttaaaactaaaaatagcaatgaatcagttgcgaaaggactagtgaatgaacgaattaaatttcgaatcagaattaattaaatatattacaagtgggacaataacagtttctgaggatgattttcaaaaaagtaatattcgtgaaacagcaaaagattatgttgtgaagactaagctgtggcagtatcgagacgatattagaacaactgaacaactatgggctaattttaagcagattttagagcagcataatcaaaatacactcgataatccgctaagtgtcatggaatttaatcaggtgaagaaaatcatttcagatttaaaaacaccgtatgatgctggtcaatttttatatgggttaaatggtgtctctcagattgaaattgatttagatgatggtcggcatgtgtttttaaccgtttttgatcagaaacaaattggcgctggtaatacagtctatcaagtcgtcaatcaaattgaacgaccagcattactaactgggaagcaagaacggcggtttgacacaacattattaatcaatggcttaccaattattcaaattgaagagaaacgagattcacatgatgttaatgaagcacttaatcagatgcatcaatatattttagaaaatcaatacactgacattttttcaacattacagattctggtggcaattacgccgaataatgttaaatatatggccaatacaacggcagataaatttaacaaagatttcgcgtttaattggcaacgaaaatcagacaacaagattgtccgtaattggcgcgaatttgcagattcaatgctaagtatcccaatggcccatcaaatggcgactaactttatgattttggatggtactaagaataaacaaatgattaaagtgatgcgcccttatcaagtttacgcaacacaaaatgtcattcaaaaaataaaaaaagttgattttgatatgggactaaacaaaattggctatatctggcatacaacgggttcgggtaagacaatcaccagttttaaaacagcatggcttgctagccgaatgccgggagtcgataaagttgttttcgttgttgaccgaattgctttaacaaagcaaacgaatgaaaattacaaagcgtatgatcctgatggtgcagtggctgatgatagtcgctctggcagtgtgcaagggacacagagtaccaacgacttaagccggaaattaaagagcaaggataacaatatcattgttacctcagtccaaaaactagaaacactggttaagcgtaagagttttaagtcacctgataaacacattgtctttattgtcgatgaagcacaccggtcaactggtggggatgcttttgaactattgcaaaagagctttaaaaaatctgcatgggttggttatacaggcacaccaatgtttgatgaaacaactaacggtttacgaactgaagatatttttggcgaattattacatgcttacacgattaaagaagccattgctgatcgaaatgtattagggtttaaagttgattttgagacaacaattgatacggaaagtatgaaaacacaatacttaccggacttttataaaaagcaacatccagattgggaacagcaaaaggttcaagataaaattgataatttatcacaagaagatatggatgacgaaattgcacctagtttctatgatgaaaatgaagatcatgttcacttagtcgttcaggatatttttaagaattggcgtaatcgttctaatgaaggaaagtacaatgcactatttacaacccatgttggtggtggtaaagcaagtacgccaatggccatgatgtactttaaagaatttcaacgggtcaatgaagagcatgcaaagaacggcggccaactgctgaaagttgcaattacatttagtcaaaatacaacgaataaagatggcatggtcgaaaccaatcagaatttgcacaatgcgatgaagtgttataacaatcaatttggaacaagttttgggttagatgacgtttctggctatacgcaagatgttacgagtcgccttaatcgaactgcaactgacaagaactacctagatttagtgattgtcgtggatcaattactaaccggatttgatgcgccagaaatgaataccttgtatgttgatcgtactttaaaaggggcaggtctaattcaagcgtactctcgaacaaatcgaatcgctgatatgaaagaaaaaccttggggccgagtggttaattatcggtggccgagccagaatgaaaaattaatgaataaagcattagccatttattccaacaaggattcagccactttatcagaaaaagaacagcaaaaggaaaacgtcgattctggagttttagcgaaagactttaaaaatatggtccaagaggttcgtgggattgtcggccaactggatgatttaacggatggttttaatcaattaccaccaagtgaacgccaaaaagacgagatgtttgaattattgcgacaatacaacgtcggtatgtcgaaacttaaacaatatacaccgcaagatggtgaagaagatagtggatttaactatgatacgccggacgatttaattcgcgctttagggatgacaccggcacaagaaaaggaattgaccactgttttaacgaatgaaataaaacaatacattagtgtgcgggataaagtgcctgttcagcaaattgagttaaagatgacgcacatcaaagatgttcaagtcaactacgattacttgacggaactcgttgaaaaactcttgaatgaaatgcatgaagaaaaaattgaggctgctcagaagacgaagaaggatattgatcaatttgcaaatggcttagaagaccaaaattatgcgcacaaaattaaaaacgcgacacaagcgatccttgatggctactatccacctaaagggatggcaatgatatatcctgtcaagttggacgatagtgagcaagttattcaagaagctaatcagattagtattgatcggattttattagaatttcgaaaccagtgggggatcacagatgtgattacaagtgctgggttacgacaactatttagtacgcatcaatatggccaacaagatttagatgatgctggccaattgcgagatattattgctgaagcaagtttgagttataagaatttagcattagatactgatatccaagcactttcgaaaatcaggtaccgaaacggattacgcgaagcaatttatttagcagctgataaacatgtaatacattaaaagatccgcaattaaaggagaacgaatctaatgagtgagataacaacattacaagacatcactaagaaattatgggcaatggccaatgaactccggggaaatatggacgctggtgaatttaagaattatatcttagcctttatgttttatcggtacctttcagaacatcaggaacaatatttagtttctaataatgtgattgatgttgccgatgggcagacaattaatcaagcttatgtcgaacaagcaacggcagatgaattagctgattatcttgaagatatttcgtcaagtttaggttatgcgattgcgccagctaatacgtggcaatcattaaatgaacgaattgaaaatagcacggttattccaagtgattatcaaacgatttttgataatttcaataaaaatgcggtcttaaatcaagaggctgctcaagatttcaacggggtctttaacgacattaatctcggtgattcgcgcttaggtagttcaacgacggcacgtgctaaatccttgaataatattgtcaaattagttgatgatatcgaatataagagtgatgaagataaagatattctaggtgaaatttatgaatacttaattggacaattcgcggccagtgccgggaaaaagggtggcgaattctatacaccacaccaagtcagcaagattcttgctaaattagtcacgatggatgtcgcacctagcaacactgccttctcagtatatgatccaactatgggatctggctcattgttactaaccgttcgcaatcaattgcctgaagctatccgctccggagcaattaagttctatggtcaggaattaaatacaacgacctacaacttggcgcgtatgaatttaatgatgcatgatgtgtcatttaataatatgactttaaacaatgctgatacactcgaaagtgattggccagatggaccggatgaagcaggtgtcgatcaaccacggagttttgacgcagtggttgctaacccaccatattcagcaaaatgggataataatgaaacgaaactaaaagacccccgttttagcgaatatggcaaactagcaccagcttccaaagccgattttgcatttgtgttgcatagtctctaccatttaaataatgaagggacaatggcgattgtattaccacacggtgtgttattccggggtgccgctgaagggaagattcggcaaacattgattgaaaagaattatttagatgccgtcattggcctaccagctaacctattttatggcacaagtattccaaccacaattcttgtttttaagaaaaaccgccaagtgaaagacgttctattcattgatgcaagtagtgacttcgagaaagctaagaatcaaaataacttgcgagatagcgatgttgataagattgtcgctgcatacaagagtagggaagatgtcgataaatacgcccatgttgcaactttagacgaaatcaaggaaaacgattttaaccttaatataccgcgttatgtagacacttttgaagaagaagaaccaatcgacattgatgaagtcaaaaaagaaattgcagccattgatttagaaattgcaaaattagaaaaagaatttgcagaaatggaagcacagctcgtatcaacgaaaaaggagtctgattaaatgaaagagcaaaaaaagcaaccagaactccggtttaaaggctttactgacgattgggaacagcgtaagtttggggagctgtacaaaaaaaaccttgagcgaaataaagatcattttagttcggacagaacaatttcaattgcgactatgcgttttaagaaagagggtaatggtgcggctgaaaactccctagtatcttataaagttctgcgggaaggcgacattgcttttgaaggtcataccagtaaacgatttgcgtttggccgatttgtgttgaatgacattggagatggcattatgtcaccgcgtttcacgacattacgtccaactcaggatatgcctataaaattctggaaacagtatatccactatgaaccaataatgcgttatccgattgttaactcgacaaaactgggaacaatgatgaatgagttagtcgttgatgagtttttaaatcagcctgtgctggttcctgaactttcagaacaacaaaaaataggttctttcttcaaacaactcgacaacactatcacccttcagcagcgtaagttggagcttcttaagaaaatgaaacggggacatttacaacaaatgtttccttctacaggtcagcctactcctcaattaagattcagcaaatttaaaggtgattggaaacaaaataagttaagtggcattgcaaaaattacaatggggcagtcacccaaatcggaaaattacactgacaatcctaatgactggattttagtacaaggtaatgcggatataaaaaatggtgaagtctatcccagagtttggacaacacaagtaactaaaattgcacaaaaaggagatttattattaagtgtacgtgcacctgttggagatgtggctaaaacaaaatataccgtagttataggacgaggggttgctagcgttaaaggaacagacttcatttattatttattggagaaaataaaatactcaggatactgggagagaatcagttcagggtcaacatttgaatcaattaactctaatgatgttaaagaagcaaaattttacgtcccaaaagaaataactgaacaaaagaaaattggaaatttttttcaaaaactcgatcaaactataacactccagcagtctaaagtggaaaaactaaaaattttaaaacaatcttatctccaaaaactcttcccttaaacaaaattcgttaattaacgaccatttattatttatactttgatagtgaccaaaattggtcactattttttatatgggagtggttagttatgcggagaaaatatctttttcacgaatactttgaagaatggatggtgttatataagcgcggtgcgattaagcaggtcacttatgataaatatgaattaacgcaacgtcagattaaaacacttgcgccaacgctgctattgtcggagttagaccgtcgagcctatcagcaattattaaacgattatgctgcgacgcacgaacatcaaacgacaatggatttccaccatcagttgaaatcggcaatctatgatgcacttgacgaaggttatttaaagaaagatccgacgcgtaaagcaattatcaaaggtgttgttcagagacgccataaaatgaaatatcttaatcagggtgagttacgccgactttttggtgtcttaaatctagaagacgaagttaactgggattactttattttattactagctaaaactggcttgcgctttggtgaggcattagggttaacgccatctgactttgattttagaacacaacaattaacaatcgataaaacatggaattataaacattaccgcggtggttttcaatcaactaagaatcagtcgtcagttcgaaaaatttcattagactggcaaatcgcaactcaattcgcacatttaattaaagatttacccgaaaaggaaccaattttcatcgacagaacgcgccgaacacataatgatacagcgaatcattatctagaacgtaaatgtaaacaagcacagattcctgtcattagtgtgcatggtctcagacatacacacgcttcaattttgctatatgcgggtgtttcactagcatcagtggctaaaagacttggccatgccaatatgacaaccacgcaaaaaacatatctgcatattatcaaagagcttgatagtaaagataacgacaaaataatgcagtgcttgatgacactgaactaagcaaaaaaggccgcgatttttcgcgacctttttacatacgtttgttttatggaaagagtttttgaagataagcttgttttaatttatttaactgatctatttttgtttgttgaagaagtaacatgttgtcaacttgattgaaagtattagaaattcttctttgctcatcaaaatgtggaacattgatcttaattgatttgagtgtagggaactttaaattccaagtatcagatgttagaccttgggagtttcttttaaaggcttgtatcatattaaaacgtttaaaatcataagcaaaaaactccgaatcaatttcatttttaggagtaatcacagtatacgccggactaagaatacctttgtatggagaatatccactcgcaccttgccacattctcattgaattgtatgcaatgtctccaatctcaacttttttataatttgatttgttcttactcgagttatcttttctgtctagctcactggccttaacaacacctgaatttatagtaacagaaatcagttcaccttctccacttctctctgttcgctctgtaaaaatttctcccatcgtacattgtttccaatcaccattaaattctttaaatcttaatctaggaagatacttatctttagaaggaaacaattgttgcaaatatccctgttttaactttgtaagaagatctaacttacgttgctgaagtgcaatagtatgatccaatttttgaaagaagtctccgattttttcttgttctttaaaatcagataccactgatataatcaatttatttagatccggtagatttacagactgaacagtcgttccggttttaatgattttctttaaaatatatgcttctttcgattggagttcagcgacaaaaaaatttacgtttaatttggattgatcaaaaagcaaagctttgatatcttgattaattgcaacatcaatagtcggtatgcttaaaggaaatcgcttagctaatattccacttctagtaacaattaatggggttccagcatctaccattctagttttattatcaataatcgccttttttgttatcgtatatgttccatttgagacgtatttattcttgatttcttgtgacgacaaccagactatatttccattccaatactccgggttatctttaaaaggtgttgccccaccaattaatttaattttggattgaaattccacttgttcccaatcgatagacatggttgacaaaatccgtaaacgctatttagactaatatttattactgttatttgaataaatgctttcttatacacagcgatagcatttttaagggcaaatatattatctctttgtgatttagcgtaaaataaaactagatagaattatggattaaataggagtgttacttagatgacaattgaaactgattataagaacttaaagctatgcaaacatggactaccaacttgggatgcaatgttgccagttgcattatctgttgctagtaaacagtcatctgcgattagacgaaaagagttttcggaggcaattgtaaacagtttgcaattgcctgataatctacgccagttaaagtcagaaaaataccctgacgtcaatattatagatagtcgaacgacatttcctatttcagaattaacaattggtggtttaatagaacggccaaaaaggggattctatttaattacaccgttgggtaaacaattactcgagcaatacggcggtaagttaacttctgagataatccacaagctaccacaatttatccaacaccaagacgagttaaaacaaaaagggaatcttgaaaaaactgaagatagtcagtcgacggataattcagattcggttgaaccgatacaaactgtagaccctattgtaaaggactataatgacaccgttagtattgatttacttgatcgtattcgtaaaggaacgccatacttcttcgaaaaattagttgtcgaattactaagcgcaatgggttacaaaggaacaaacggtcaagcttttgtgacgcaaaagagtaatgatagcggtattgatggtattattaatcaggatgccttgggaactagtacggtttatattcaagctaaaaggtatcaagtgggaaacaacgttggtcgaaatgagatgcaggcattttttggggcgttgagtggttttggatcagaccgtggtgttttcataacaacctctaatttctcgaacggtgcaattgagtatgcaaagaaccagcatattgtattgattaatggcgtacggttgagcgacctgatgctgcaataccaagttggtgtgaatgttaagaagcaatatacaacatttgatatcgatgaagacttttttattgaagatgattaatcaatgaaatggagctgattttcaatgcgtaatccactgactaaatttgaatttgcaagtcatggttattttggcccgcatgaagtatatagtcttgatttagaaactggtttgatgattggcagaatggtaacgtatgaatttattcaccctgaagaaattaggtttcaattggatgcagatactatccgtcgggttcgtaatcgactttcaagattgcaacttccgaagtgggctgactattatattaacgagtctatcattgatggtgagcaatggtcagtaaccgcgacctatgcagacggaacagtgattgagtctggtggctctaatgattatccgcctcgctttgggacagttaaaaatttgtttaaaccagttcaacaacagtttttaaaagattagatgtgtaatgaataaagccttagggattagtttttcaagctaatccctaaggctttatttttatgagtgctttagttattctcgtagtatcttctccatcgtcttccccttagccagttcatccaccaacttatccagccagcgaattttttgcatcagtgggtcttcaatggcttcaacgcggacgccgcaaaccacgccggtgatgagaacgcaattcggattcatttgaggagcttcctcgaaaaacgtttggtaggggatgtcttttgcgagttgggcagcgagttcggtttgtgagtagccggttagccagcagataatctgattgacttcggcttgggtgcggtttttgcgttcggctttttggacgagcatggggtagattttggaaagagacatgttgaagatgctttgcatgggcatgagaaggcctccttggcagtttagataattaatatatagcatgtaatgaaaatgaatacaaaatttaggtctgagaaagagtgaagttatttttcactctttttcttttgccctatttcttttccgttactttcttgttataatcgataccagttgtccgtgttataatacagcggactaaatgttataacagaggagagtacagatgagtattggcgatattttaacgaagacgtttacgaacatggatattgtgagttcgatcacgtcgacagtgtttattattttattaggattctactgccgcaaacgcgagatcttcacggataaatttgggaagattctgtcaaaagtcgttttaacggttgctttaccagcattagcattcaactcattcatgcaggatattaatgggaagactttaaaagaaggcatcaacgttttagtttggggcttcttgatctatattattttaattttaatttcaaaaccgttatacttacgctttaagggtgatcaacaagatacattgcgcgtgttgaccatctttggttcaacaacgttcttcgggattccaattgttggagcagttttcggagctaaaggggttatgtatagctcaattttcaacattggttatcgcgtgttcttatactcatatgggtacatcaagatgagtggcttgaagatggaatcgaagaacttgaaaaacatgttcttaaatccaatcgtgatcgccacatttgcggggttaatcatctggttaatccaaggcgcattaccacaagtggcggttgctgggcattcagtggctttcttacgaattgatcaaacagcgccatggttgttcaaaccaatgacgtacttagctggcttatgttcaccattagcttggttagcaattgggacaacacttggcgaaatcagcttcaaagaagctgcttcggacaagacatcatggatttatagtattaacaaagtgattttagtacctgctttaaacatcgtgttattggccatcttaacaatgacccacattttaccagttagctatatcagtttggcaacgattgtcatcatgatggcaacgccaacggcaacggtcgccgctgcttacgcgattagttttgacaaggatgcggtcttagcatcgaacgcgtcattactatcaacggtcttagctgttgtgatgacgccagtctggttagtgattttagaagtgattaaccaaatcgggattttctaggaagagggaaattaaatgtttaaaattgcttgttacggcgttcgtccgaatgaagtggcgacgttcaataaatataacaactacgattatgatttaacgttaattgaagacttattgacgcacgacaatatcgaaacggctaaggggcatgacgcggtcttgttacgtgccaactgtaccgctgatgcgcaaaacttagcgaagttgaatgaatacgggattcgttacgtgtttacccggacagtcggttacggtcatatcgatttggctgcagcaggcaagtacaacatggaagttgctcgcgtgccagcctactcgccaaacgcgattgctgaattggcattgacgctagggatgtcattgttgcgtcacaccacttacacaacgaatcggacagcccatcatgatttccgtgtgagcccagtgatgttcagtaaagaagtccgcaactgtacggttgggattatcgggactggcaagattggctacaccgaagcgaagttatacaaaggcttaggtgccaaggttgtgggttatgacttatatccatcagaaatcgctaaggaagtgcttgattttgtcagcttggatgaattattagcccaaagtgacattgtcagcttgcacattccatacttcgctggtcaaaacgaccaattcatcaatgcggacttaatcgcaaagatgaagaacgatgcaatcttggtgaatacagcccgcggtcaattgcaagataaccgtgcgattatcgatgctttgaaagctgatcaacttggtgcattcgccgctgacgtgttaccagctgaaggcgaaatcttcttcaagcaattcccagcagatcaacctgtgccagatgcaaccacccaagaattgattgatttatacccccgtgtcttgttgacgccacacgttggttcaaatactgacgaagcgctcaagaacatggtcgagattagttttgaaaacttccatgaaatcttgacgacgggtaagacgcaaaatagcgtcgcaaccactgaaaattaaagcggttgtttgtattttcatgaaaaatatggtatattgttatcagtaattagatacttcagagcgagtgagcagaaatgctcactctttttattggagcacgtctaatctgaaatataaaaatgaattggagggaatcatttgagtaccgttgtggaaacagttcacgatctgatcgtgccgattcttgatcaacaccattttgaattagtggacattgaatttgttaaagaaggtagcagttggtatctgcgcgtcttcattgacaaaccaaatggcattgaccttgaagattgtgccttagtaaacgatgcgttaagtgagaaactggattcaatcgacccggatccaattccgcaggcttatttcttagatatttcatcacctggtgcagagcgtcctttaaagaaggaagccgatttccaaaaagcacttggcgaatacattcatatctcgttataccaagctgttgatggcgagaaaatctatcaaggtacactaaaagcccttgatgatgacactttaactttagtgattaaaattaaaacgcgtcaaaaagaagtaacgtttaatcgtaaggaaattgccaaagctcgcttagcaattgaattttagtaaaggtaggctagttacatgagcaaggaaatgttaggtgcacttgatgcgctagaacaagaaaaaggcgttaaaaaagagattgttattgaagcccttgaagcagcacttgtttctgcttataagcggaattacggtcaagcacaaaacgtggaagttgaattcgatcaaaagaagggtaacatccacgtctatgctgtcaaagaagtcactgaagaagtgtttgattcacggcttgaagtgagctaccaagatgctttggaaattaacaaggcatacgaagtgggcgatacaattcgttttgaagtcacaccaaaagacttcggccgaattgcagcccaaactgctaaacaagtgattatgcaacgggttcgtgaagctgaaagaagtatcatttacaatgaatacagtcaatacgaaaacgaaattatgcaaggggtcgttgaacgccgcgataacaagttcatctatgtcaacttaggcaagatcgaagctgttttaagcaagcaagaccaaattccaaacgaggaataccaagcacatgatcggattaaggtttacgtttcaaaagtggaaaacacaactaaaggcccacaagtctttgttagtcggacacaccctgatttagtgaaacgtttattcgaacaagaagttccagaaatttatgacggcaccgttgaaattgtctcaatcgctcgcgaagctggcgatcggacaaagatggctgttcgttcaacagaccccaacgtcgacccagtcggcacctgtgttgggcctaagggacaacgggttcaactagttgttaatgaattacacggcgaaaacatggacattgtgaagtgggaagaagatccttcagactacatcgccaatgccttgaatcctgccgaagtcatcgctgttcaatttaacggtgataacgaacatacatgtacagtcatcgtccctgattatcaattgtcattggcaattggtaaaaaaggtcaaaatgcacggttagctgcgaagctaacgggccacaagattgacatcaaacctgaatctgaagtcgaattcgttgatgaagacgacagtcaagatgaaggtgcagtcgttgaaggttttgaagaagaaacaacagaagctgttgaaggcttcgaagaccaagcaacggattctgctgttgattctgaagaacaaccacaagaataagtgaggtgttcatgatgaaacaaagaaaagtaccaatgagaaaagacgttatttcgcaagaaatgaagcctaaaaaagaaatggtgcggattgtaaagactgccgaaggtgagattagtattgacccaactggtaagaaatcaggtcgtggcgcttatgtttcactagaacctgatgcaatcaagaccgcccaaagcaagaaaattttagaaaagacgtttgggattgacgttgcagaatcattttatacagaattattcgaatatgttgatcatcaaaaggctcggctagaattatttggagaacgaaaatgagtgaacaaccagaccgtttattacaactcttaggtatttgcatgagagcacggcaactggtcagtggtgaagaacaagtcctaaaagccattcagcagcaaaaagcgaaattggtttttatcggctcagacattagccaactgacacagaagaaattgactgataagagtcatttctacgaaatcccggaaacaaaagcgtataccgcggcccagctaacccaagcaattggattacatagagccaccatcgcggttgttgatgccgggtttgccaaaaagatgataacgctactgggataataaaggagcgtgaagatatgggtaaaaaacgtatctatgaattagcaaaagaaattaacgttgccagcaaagatcttttagaaactgccgttaaaaaaggttacgatctaaaaaatcacatggcaactatcgatgacaatcaagaaaaagctttgagagccatcttccataaggaaacaaaaccagctgcaacgacaactgacagcaagccagccggtgcagcacctgctgcaccaaaggcaagcgaaaaaacagataacggtaagattaagattaacaaagccgctatccgtcgtcgtccagaagctagcagcaaaccagcacctcgttcaaacaaccaacgcccacaaggcaaccggaatggccaagcagcaaatggtcaaaaccgcaacaatgccaatggtcgtcctaacaacaataacgcccgtcctaataatggtcgccctaacaataatgcggctaaccggacaaacggcaatacgcgtccagctgggtcaaaccaaccattgagcttgcaagaacaaatctcacaagctaatgcacgtcgtcaaagaacgcaagaacgcattcaacaacaacgtgaacaacgcgaagcagacgaaaagaaacgccgtcaacaaagtaaccgcccacggccagctgctaaaccaaacggtaataacagcagtcgtccagccggcaacaagccagccggcgcacgcccaacgacgacaaataatcgtcctgcaaacagcaacaacaacggccgtccagcaaacaatacaaacagccgtcctaataacaactcgaaccaaagtcggccagtttcggcacaagaaatgcaacaaaaaatgcaagctaatacggtgagtgctgctaaaccagcatcaaacaatacagcaagcaagccaaagaactttggtccagataagaaacgtggcggcgggtataacagctacggtaacaatcaacaacgtttcaataagaaacgtaagaagacccgtaagcaacaattagctgaacaaaatgctgctaagaaggaaatgccacaacgtaaagaacggccattaccagaagtattagtttactctgaaggcatgaacgttgcggacatcgctaagaagattcaccgtgaaccagctgaaattatcaagaagttattcatgttagggattatggttaacatgaaccaatcacttgataaggatacaatcgaattattagcaacggattacggcatcgaagcagaacaaaaagtggaagtggatattgctgatatcgattcagtatttgaaacagaagctaagagtgatgccaaccttgtgagccgtccaccagttgtcacaatcatgggtcacgttgatcatggtaagacaaccttattggataacttacgtaacagtcacgtgactgatggtgaagccggtgggattacgcaacatatcggtgcttaccaaacgaagttaaacgatcgtttaatcacattcttagatacacctggacatgcggccttcagtaacatgcgtgcgcgtggtgctgatatcactgatatcatcatcttagttgttgctgctgatgacggtgtgatgccacaaacaatcgaagccatcaaccatgccaaggctgctaaagccccaatcatcgttgcggtgaataagattgataaaccaggcgcaaacccagatcacgtcatggaacaattgatgggttacggccttgttcctgaagactggggtggcgataccatctttgttaagatctcagctaagactggtgaaaacattgatgaattacttgaaatggtgcttcttgaagccgacgtgcttgaattgaaggctaacccagatcaaaaagcagttgggacagttatcgaagcccgtcttgataagggtaaaggacctgttgcatcactcttgatccaacaagggacattgaagattggtgatccaatcgttgttgggaatacctttggtcgtgtccgtgtcatgacaaatgatcgcggtcgtcgtgtgaaggaagtcttcccatcagaaccagttgaaattactgggttaaatgatgtgccacaagcagctgaccgttttgttgtctttgaagacgaaaaaacagctcgtgctgctggtgaagaacgtgccaaacgtgcgctcttgaaggaacgtagccgttcaaaccctgtcacattagataacttgttcgaaactatgaaacaaggcgaattaaaagaagttggcgttattatcaaagccgacgtacaaggttcaacagaagccttggctggtagtttacggaagattgaagtcgaaggcgtgcgcgtgaatattattcatgaagccgttggtgcgattaacgaaagtgacgtcacattagctgctgcaagtaacgccatcatcatcgggttcaatgttcgcccaacaccacaagctaagattcaagccgatgctgaacaagttgatattcgtttacaccgaatcatctacaaggcaatcgaagaaatcgaagctgctatgaagggtatgttagaaccagtttacgaagaaaaagtaacgggtcaattaactgttcgtgaaacatacaatgtttctaagatcgggacaattgccggttgtatcgttgacactggcgttatccaacgtgatagtggtgtccgcttaattcgtgacggtatcgtgatttatgaaggtaaactttcaagcttgaaacgtttcaaagatgacgttaaagaagtcaaaactggctttgaatgtggtgtgacaatcgaagattacaatgatattaagattgatgatcaaattgaagcctacgtgatggaagaagtacctgttaaataattaatttacaggaggacaagcaatgaaacatcgtgttggtcgggttgaacaagaaattcaacgcgaaataaatgacatattattaaaaagagtgcgtgatccccgagttgaaggggtcacaatcactgatattaatctcagtggtgacttacaacatgttaaagtttattacagcattttatctggcttagcaagtgacgctgaaaagacacaagctggcttagataaagctaaaggattgattcgcagcgaacttggccaacggattaagttgtacaagattccagaaatcacctttgaacaagacggttcagtgcgttatggtgaacatatcgacgaacttttacgtaagttacacgaagatgaagcacagcgttaaactgtgaaaaagagccccgcgaaagcggggctctttttttgtttgaatgaccttatggaaacgataatctattaaattgacttagtcatttgcaccatattactattctttcaaaagttgattaaatatcgaccgttaaaatatatcgtccaacgctatcggcggcgaattgataagcgttatacagaggccttatcagtttctaatcgctggttgcggttttattatcatcaacgagaaatatcccacattattccacagattctttattatttagaggctaatccggcactagaaacgattgatgatgcgattgcttatattgatagtcagccggttagtttagagctgtatcaaaataacttaagcgagtttcgtaaataggttaagcagtttaatacaatggtgctgagtacagcgaacaacctgggacaaccgtctagtcgacagattaattttgtcacgcttgatgggataccgaatgtctggtattttggcaccgaccccgaagcgtcgaaagtcagtgaactcgatttggggcgagccgcaatttttacgctaccgactagtgaagaattgtgaatcacgagtaaccggctcaaggtataccgaactcagtatcgttttagtgatatagcagaggcctatcaaaaacaagtaccaggctatgttgagagtttatccaaagaagaacaggaaaaagagattatttttgcgatcgaattaaaaagtgctaggatcgatagtcggtttcaaaataaaggactcactttttctgagtaaaaaaagttactaatatcgtagaagttttctacaaaggtaatcgaattgcctcccataaacgactaaccggtaaattcgggcaattttcaaccaatcacgatcatttgccagcagaacataaactgttcgtcgatcatacacctgagaacgcattagcttgggcggaagaggttggcatcaatacgcttgccgtaatgcgatatctacttaaatcggcggcaagtgaaaaacaaggtctaagtgcagcttttcgattcaaaggcttagctagaaaatacgcagctattgaaatcgaagccgcgtgtacgaccgtgatgaaaattgcgaccgcaccgacggtgtccgtagttgaacgggttatgaaaagtcaaaagattccagcaccaaagacgattaacgaacccgactacggttttactcgtggtgcagcatactttggaggaaatgactaatggtaaatgacgaaactcaacggaagttacggcagatgaagcttacctctatggcaaatgccttggaagcacaggaaagcaacacagaatatcgatcaatgaactttgatgatcggttcaagttactcgttgatgcggcttacgcaagccttcagtcaaataggctgaatcgactgatcaagagtgcaaattttcggacgaatgagccatgtatagctgatatcaattacttgccggatcgtaagttggatcggaacttgattcaacgccttgcgactggcacgtatattcaagagcaccataacgtcatcttaatgggtgcttcaggtaacgggaaaacatggttggcgacagctttggggattgaggcttgccatcagtttcataaagtaaaatatgtgcgtcttcccgaactgattgatgatttgattgtagcgaagcatgaggcaaacggtgactttcataagattattgaacggtacaagaaagttgaactcttgatcatcgatgagtggcttttgacgccgatcaacgatgaacaagctcagactattcttgagttgatcgaatatcgaagtcagcgtggttcaacaatcttttgtactcaattcgcgccggaaggctggcatagtaagctgggaaatccacagattgcggatgcgatccttgaccgaatcgtccacgattcttacaagctccttatccaaggcgacaaatcgatgcgcgagcggtatggaatcggaggcgaatttgcatgatttcagtagaactggaacaacgattggcgctgttctatgcacatacagacgcaatggaagactgggaaaacgtacttggcgatgcgctggtggatattatctgggaaaatgacgataaattgaccgatgacgagcttttcgaatatggaaaggaagtcatcgtgaaatacctgggcaagtgccgaggagacaagctcccgtaaaactgaaaatggcatcgctgaaaacgctcagcgatgccatttttgaaattcttggtcaattctttcgccgagcggtgtcaattttagcaccgaatggggtaaaaaagatcgccgagttgggcaattcgcttcgccgccttcaactaatcgatgtggaagaccataggtctttaaaaggcgtttgagaaaatgataggccgagttaaagtcacgcttcttgcgcagttgaaaatcaagcgtaagaccttgatcatcaatggcacagtagaggtaattccattgacctttgatcttgatataggtctcatccatacgccaacttttggaagtgcgccgatggcgcttacgccatagagcccgcataatcggtgagtaatgttgtacccaacgcatgagggttgtgtgatgcacgaaaataccacggtcgcgcatcatttcaactagatctcgataactgatgttgtaacgcaagtagtagcctacggcaaaagtaatcaccgattgattgaattgccgtcatttaaaatgatcagtcatctgaaaacctccagtttaaattcatgatacaggatgcactctccctgagtaaactttgcaccagaaccaagcggctgaggcgaatgacgtttttgatctggctaacgccgaggagcgggataaatcggaagacaacgacgagtggattgaggacgagcagtatgcttatggcgatgattgggatggggtctgacctggacgggatgacgacgacttgacgacccgcatattcttcactttgtagatgaaacgttagcacatgcagatcacgttttacgcggtcaacgttatggtcgttgattcctagaaatcgcaatacaccaagattatctttggacaaggtagaaattggtttatcactgacgggatctaagctaattctagagtgcataaagatacccggcacaccccaccacgttggtttaagcgaagggggcgtgccgggcattatttttagattccgttggtgataatccagttattgtttggcttggataggatcaaggtgtattgcgatatttggctcatgtcattgtcagtgtcgagatacttcacagataacgtgacagtcaaaccgcgcttagtctgcttaaagactggatctagaagttccacgaacttaaggttgcgttcgattggctgcgtgccgtccttgacgtaatacttgagttcgttgcgatcactttgcgggtacaaagcgaagaacgttttgaggaacttggttacgtcgtctacggtgctgctggctaccgtgttatcagactgggtatctgggagcttgatccgggccgtcgctggttcagccgcgatggttgggttcttagtgaccaccatatcgccgttgtcattttgcatgacgttgatggtgtaggtactggtcacagacttcttgtctttacctttggtgagatcttgtttcaccgtaaatagtacgcggaatgtgtctttggccgtcttgctcacgtcccagaccttgacctcactaactgtggcggttgtaggaatatcgctccgcacagtatctgcgttaagcgattgcagttgctccacgagatacggctgtaaggatttctgccgctggtcgagggtttcgtggcttggctgccacgagtagtagagcttggcgaagtcggtagtgaaggtcgccaaggcgtgtgtatcaattaccttggtcttgatcacttggacttcatgcaccgtgtgggtgtcaatggaggtcatgttcttgtagacgccgaagctggtgctaccgatcaacaccgcccaacaaagcagcgtgaccggacggcgcaagccgcggtgcttaatttggagtgaatttggcgcggctggcttctttttgaaccagcctttcttttgggttttgtctttactcaaggttcgttcaccttgtcctttctagtttcatagcagcggtaaaagtcatcgtaaatatcaagaaaacgcacgaacaagcgttgcagggagatgcgcttgtagctctcatagtcggtttcgatatactgaccgagctcacggtcgttgttgaagtattcttcagccaagtagcgttcgcggtcgaggatatacttgcgatcttctggggcaaacaccttgccaactagccagtgctcaaccgcaacttcatgggccacagccagtcggcattcgcggcggtggccggactccatttctggcatacggtccacgaagcggtcgatcacgttgcacaggtcgtcggtgttgggctttctttgtttgaagaacttgattcgttcccattcgctggaagcgaagtcgagttccttgtttcttagcgcgcgattgtcaccaaatttgagatcgacgtgagccttttgcagcgcgtcgtcataggtgttggtgatgagatccatccagtcaaaatagctgataccgttttgatccatcgtcttcacctacttcttcacacgcccggcgccgatcaggtgggattgccaatagtttgagttcaagtcggcatagcccagcgggtcgcccgcattatacattttcatgccgtcaacgtagatcccaacgtgggtcacgtaatctgcggtgtcataggtggaatggaagaacacgaggtcgccgggtttggcgcctttgatgttcaggtgtgctgtggcgtcgtattgtgcttgtgcggtgcgggggagtttgatcccggctttgccgtaacaccaactagttaatccagaacagtcgaagcccgttgctggcgttgaaccgccgaacacataacgagtgccttggtacttgagcgcttcgtccatgatggcttgcaccgtgttgtcgtcgaatttagcgccaccagtgacaaggtattgcgagatgaccgacacgtagtacatgttcccataggcatagcgccaaccgtccttggcaaccgcgttggtgtaggtgaatttcttaccaccagacttttctttagcaaaagatgttgccagctcaagcgtgtactttttcccgtgcctagcaacgtagtcaataaagccgccaccatagttgtagctttgaatcgcggtgtttagatccacgcccgcagctttcatgctttttaacagcgaagcgaaatatttcacgccttgcttgatggatgattcggtatctagcgtattgaccggtaggcccatcgattcactagcttgcatcacgtcgccacccttgccacctgattcaacctgcatgatggcaagaattaccatcacttggtccgaaataccgaactccttgcaatacttttcgaccatcagcttgtgcttgtagacttcagcggataagttcatcgcgtcggctgtgaccgcagaggcaggctgatcttcgtcatcatcagaggcgatgactgcaaaaaacagaccgcccatcaacagtattgggagtgcggcgagagctaaccagtgccagagcttcatcgcttcttatgccccttagccttttgaatccgctgcggctttgggtttcgtggcttggttgggtttcgtggcttggctggtttttcggaaacgagggtcaggagtttcttggttttattcattggcggagtaggttcttggtgcggtttgatggtgggttctgcttgcggtttcgtgactggacgtggaggccgagttgaagttggcttcgtggcagcacgcttaggttgtccactggtatcagtttgttcaggctttggtttggtaggtgtggcagttgttggcttacgagttggttcaaccggcggcttggtagccgttggttttggcttttcaggatcagctttaggcttgatcgccagcttgcgttcttgcatttgcttacgccgctgctcaagctgtttgtcacgttcctgctgattagcctcacgccgacccttgaagctatcttttgcagtttcggcggcctccttggtcagttgcttaccacgatgcagaccatataaaacgttggttggtgcgtccttcacctgatcaaggccgcgtttagtcttgtccttgagcttgttgccgacatcagatacatcggcaaatttctcacccagacgttggctgcgtggcttcttggtttgttgtggcttggcagcgtccgcagtttgctcgcgttgcgtaccagcggggagctgtggtgtttgcggcattccgcgcctcttgccatagccccgcgacaagaagcgtccggccattgcgccacccatggcactaccgacgaactgtcgtagcatgcggttcccacgacgcgagaagcgttgtgcgccttgctgggcgtcagagctgtggagatgcatcatgcccattaggtcgccgagcttcatccagataccggcgaagatggtaacttgcaggaaggccacgaggaagaatggcgaggtagccgacaacccatagaccattgccgatagcgagaaagccatcgtaatcaccagcgtcacgccaactcgtgtcatgatggtgttaaaaagcttcataatgttctgcttcatcaatccgttaaatgacggcagcatagcgagtaagaacgacaccggtaagaacgtcgcgtagatgatgaagaggatctggctgaacagcatcattgccgtcaggaagaagacaaacaaggtgatcgcaatgttgaacaggacaacaaaggtcgtggtaccaaggcgattgatcgtcatagttggcgagagattctcgttatcgttgtcttcaatttcagccttgaccacgtcagtacgggttttgcctttgtcgccaaacgggtcggttttcattaacgtgtttacgcggtctttgccaacggtatcagcgtcactgtcgccaaactgtaaaagcgtccacggctgcttcacctgaatttcaaacagggtgtcacggatcgcatcgacacctgatttatctgttgcggtatcagtgcccataatcatcttggagccagtgttgagcgcgctggcgctgatgtcgctactgaactcgttgattttgctgacgtaatctggggcataagcgataaagctggctgacgtgatgaagatcaccacgaagttgacgatcgccgaaatggctttcgaggtttcacgcttgatgatgccagtgtaggccacgtagataccgacgacgagtgtgatcatcaggagcaagcccgggtaaaagccgtcagtggtgaagccatcttttgacaccccagccaagagctgcatgttcttcccaatcgcgtcagacgtatctttgatgaagtccagcgagtaggcttgctgaatcaggtagcccgcagcgtttgagaggtagacagaaagtgtccacaagaagttggtgatagcgtacaggccatagctaacagacttgccgataccatcgccccaattccaaggcaaccagtcccaagacgtatcgacgaagtagtcgagctgatagtgtgacaacgggtacttggaatactcgttagagccaccagactgatcgtctaccaaccccgctgcgtgtaccggctgaccaccagcaagcaccagcatcaacataaatgccgcgacaacaccgaggaacagcagaagccgccgacggttagctttcgtcatcagcgatcacctccacgggtttcggtggccgagtgtcaaaggcgtggtgtaggtgttcaaagatatagtcaaagtgcagcacgccgacgtgcccccagatgtcttggaacaagcactccccattatctagtgaccggagccggttttgattaccttcgtcttcggcgtcgaggccaaagaagttcaaggtgttcttgatttccgtgatgtcggtactgcggaaggcgaacttctgggcgatgttgttcttcatcttttcatcgagcaagtcgtctgcattttgagtgacgaggtagaccccggcattcatggagcggccttcacgaattaacttcatcgacaaggctttgccttgcgcaacattgaggaacgcccaggcttcgtccaagtccacgattttgaactgggcgcggttttggtgaatgaagtcgatcgcgaacgtgctgataatcatgagcatggcgacggacagcatttcagcagtgatatattcttcctgcgtcttgtcggcgtctggaagcaccaagtctgcgatctgcacgatgttgatcttgcggtcaagggcgattgtccgccgcgccgtcccgtcagagaacagcaatgccgcaaagtcatagtccgtgaaggattcgatatgatcggcaatgttacgtgcgatcggcgtgtcttcgcggcgaagttcatcaatgactttcaacagtcccggttcaggagcttgcgttaccgcgcgaatcgctttgcgcagcgtcggaaagcggtcggcgtcacggcttgagatccccgtgaggaaggtcagggtatcgacggccagcgattctgaatctttcaagttggacaagatgatataaggatcaagcagcccacggttttgttcttcactggtcaggttgacgatgttgatttgatcttccataaagtcgaggttctctgcccagccagtacgttccgacttcggatcaagaatcagtgcctgtgcgccgtaaagtacggcgtagtatacaagcaagttgttggagaaggactttccaccacccaagctaccaaggaaggcggcggataaggcgttggtgacggtgcctttgatgccttgcgcggcaatgtctggttgcaagtagacgttgcgtccagtgtctacgttatatccgatgtagataccttctttttcaccgagcgattgcgtcgcaccaaagcctagtgaggcgatgaaatcgctggtcacatactggatatagtcgttgatatagcgctttgaagcggggataaactcgctgtgaagccccagcatgtcgccgaatggccgcacgagcttgatgttgaggctgtcgtagaagtcgagtagctgatcagcgcggcgcttcatttcgtcttcactccgcccagctacgcgaatgacatagctgatcttgtacatggcgtccttagtctgatcaagattgctttcaagctcatcgactgaatccaacgcgtcgctgaccccacgcgtcatttcattgccggattgataagcgtgttcgtcgaggtctttcaactccttctttttgttacgcaccttggtcagcgcctttttgttggtcacaatctcaacgttcaggctggtgtcgattggaaaatcgaactggctttgttggaaataaaagatttcactgccgggaaactccaattcaccaacaatgtcggaaagcgtcaggtacgtcacgtaactgctatccagcccgtgggtgatcttgatcgagcgttggtgctgctcaatcagtgagcgggttggcttgatcaggtcatagcccttgataatcgtgtcgcgcttggacttcttgcggggcaagtgatagtcatagtcatcgtagtcttgacccgtcatgccgtataagtgctccagcaagtagccgaagtcgttcttatcgagcggacgaactttgaaccggcgaccaatcttttcggcgagaaactttgcggacttggcgtagcgttctacctccgcgttgttcatggtgaagaaatcaccagcgaacgttgtgttgaactcggagaagaagtcccgaatgcctaaagacatatccttgaagatagacttggcggtaacctctgcgtcgttcagcaacagcttaaagccgatgaagaagcggtagtccacttggttgtcaccgacattttcagtcaatgcttcggcttggccgtcgatgtgctggaaggcgatgtctttcagcgaccccttgaccaacttcttcgagcggtcgagagtgtcccacacactggcttcggtggcgagctgcaataaatggagcttgccgtcgcgattctgcgagatcaactgacgaaagttctcatggacttgttgtttctgttcagggcttagaaacgagtagttgtacggaatcaattcaaaataggcaaagcactcgttgtctgtgttccagaccaaattgtcctcaatatatttaattggaaatttcattgtggtacctccaaacgtaggtcacagcagcaatttgtttctctttctgcgacttcacaggtttaccagcataggtgagcttcggggtaatggcgtagttgatcaccgaccgcaagaatcccattggcttcttgttgtcgaaggtcttctggctcatgaaccacgttagcccagccggaatgccgacgtacttgagaaacacgccgtcaatgaatgatagtggtggcaagtcgcccagaagcatgactgcaaataagctgacgatgaaccacgtcatttgcgtaaaagtaattgggaacggtagttgcaggtcattgatggcatacagcaccttttccactgaccagatgctggtgtaggatctgactttcttcatgtgatctcctttcgtagtgagataaaaaggctggcgccttttgcagcgccagcccagagagttagtctaataattggtagatgccgtaaggtgtttcaacgaaacctccttcaatttcgaggtcacgtccgaccttggcatagtcgatatagttttcgacttgtggcggaatgtcgccgaaccagccttcgtcagccagttcttcggccaactccgccatgttcgcgacgtgatagcaggcgatgtcgtccttgtgcgccgcgagttcaatcacgttgtcgtaccattcgccgataagctctttgatggcagggtaaatctcggtgcctttcaatgcttcaacggctgcggcagcttcattgatctcaccaatcgttgaatactcactaaagacaatggggccttcgtagtcctgaaccatgtattcttcgtactggtcgttcagtcctagcttttcagcgagttcttcgttgttgattggcggcgtgaaccatgcgccgacaatctcgccctcgttatacttgccaagattggcaataaagactttgatgtcgtccataggctaagcccccatgacgcggttgaatagattcagcagtacgtctttgaccccggcggtgttgaacaccaacccgacggcaatgatcgcaatgactaagaagccgatcagcttggaaaactcgcgcttgaagccgaggtagaccccgataatggcaatcgccatcagcaccaagctctgggcgttggaggtgaaccagttaaacaagttttgtccgaaattcataataatcatcctttgatttttagttttgtgaccagggctcctttcaaaattgctgctgttttggcgcggtcagcagcgaccggatcatgggtaacggatcagaaaagttcagtttgagttgcgtggtggtgcttgatgcgatcaagggcacgccaccagtattcttcactaatttcataaccgatgaaatgacggtcagtgtccattgcggcaatcgcagtggtaccagaccccatgcagttatccagcacgatctcgccgggttgagtgtaagtcttgatgaggtaggcaaaaagatcgacaggcttttgcgtcgggtgccagccggtgcgatcagacttgtagttgagcacgtcagacggatagttcgtccattcttgtgtgtagctatcgggagcgttccacgggtgcagctgatttgagttctcgtatttacgtgagttgacggttttgttataggggagcagtgcttgggggaagtagttcatgcctttggtatcgggggagttaccaaagttggccgtacccgacttggagaagacgagaatctcctcgaaacgggataaggggcggttcttggcattgacgaagttggtgacagtattcttgatccaaacccacttgtagcgatacaaggccgggtttgattgcactaagtccgcagagaaccgttcagttgcggttagcacaatcgcgccttggggtttgatgagccgttcgtattgacccccagaggtgggaaaacggaatcaccttgtcccaagcgtttgctgtggtaccatacggcaagtcgcacaggatcatgtcgatagaggctgtcggtaagtccgccataccttccagacaatcgcgattgtagatgacgtctagttcgattgcgttgatactcctttagttgaatttgtggccatcgctcctttatgaattgcgattgttttggcgcggtcaatagcgaccaagtttgttaatcgaaaaataggtcttccactggtgcagcgaagaccggccagcctgattcttcggctgtttgataaagcagtcggcgcagttcaccgtagttcaaagcgcgaccatcacggccaatcaatgccgccgggtgttcttgttgctggtgccgccaagcaatgtagtcttgtgccgtgaagcccaaactgttcatgtcgcaaatgcgccggtacttcttgtgttcgaccacgccgactagtgcagccttgtagacgtatacgttcagtacacagtctgtgaatgccttgccgcgcagcgggtgggaagcaagcacatcattgaccaaacatgtcacctcctagctcctcgctaccaacagtctgttgctcaattagcttgaggtgtttatcggtcagttcggcgtccttgatcatgagctgtaagtcagtggtgccgaagtagttgtcgatttccttgatgaccttgagtgtgggcatgacttgcttttggagccatgccttggttttgttcaggtcaaagggttgtgggtcagtagtcaggcggatcggttggcgacctttgccaaggaagtatgcccaacgttcgttgagcggccacttgagacggcttttgtccgggacttcatcaacaaagcgcatgtagcgggtgataataccgaaggcgaccttttcggcgtcacgggttatcagcatgttctcaatcgccttgattgcgcgctcgtttttcaaacgaatttcaaaccggttgatgatcggggtgtcggcaatcgagatactacgtttggcagcttgttcggcagccttttcgtagatgcagaaatacacgtcacttttcatcgtgccgacgtaaagcgtattgcctcggccagcttcgtcgagatccacgagcttgcctgattgcagcccttggaacgatcgcatgacggaaatgcattcattgttcagacacttatcgaccagctccggaatgcttagcaggccaaccatgtcgttaatcgcaatatcgacccgcttgaagatgccgccagcttcatcaacccgaagaaagtagtcgtaccagttctcaccatgacttagcagaatgccttcaaactcgcggcaaccttggcctttcatctcaaccaatgtgccgaggttggagccaactggtgccaccatgacctgaatgttagagaagatatacatggccgaatagccgtagaagccatgttcctcaaatatcaggtgttctggggtcagaccgagaatattggtgatcacagtcttggcgtcatgtgtcgggaaccgcacgcgcatgtagtcaaacatcagcgtcagttctggttcatcgttccagttcttgagtagccggtcgatttccatttgcagcgatgagctagggttcgtctttccgttttccacttggacgtaatgcatccgtgtaacacctaagcgccgggcgacttgagcttgggtcagcttgagttgcttgcgtttggttttagttttttcatgccatgagcacatggcaacgctcctttcaaaaaatgatggattgggggtgccatccatcattttgccttcttctattgaaacgccgtcatatcaacctttctaccccgtgctcaggcaaagacgttgtatttaatacccccctgttagagtactgggggtaagcggtcggcgccagccgaccgctgccactcacgcctgcggctttcgcgctgcacgccgcgcgtggcggcagggtgcagccttgctgaacagattggttagtcatagtcctgctcctttcaaaggctttgtcttgacgacggcgtgtagccgattagtaatgatgcgcccagctatgataggtgagctgcatgccagtttgcgtcatgttagctgtgaaccagaagtagacgggcttgcccgaaatagtgcgatcaccgacgagctcgagccagtgatcgccgtcttcgtaaggctcaatgtaatcgcacatttccagcagggcgtcttctgcgtcctctggggttccagctataatcgtgtcagcgtagtcttcctgaaaacgactttgattgttaataattggtattctcatgggttctcctttcgtacttgtgatttcacgtttcaagcatcgttatatggtataatgatgcttgaaacgtgaggcgaacttaatgtcagatttaattgaatccttcttgaagcaaaataacgggcaggtaacgactgcggatgctagaaaacttggaattgatccacatctgcttattgatcttgcaaaccttggtaagctagaacgagtagggcgtggggtgtatattgacccggcgatatttgaagatgacatgtatatccttcagtatcgttttaacaaaggtatctactataaagacactgcgctctttttgcatcatatgatcgacaggacaccggatcgttaccaaatgaattttcctcgcggctataatgcaagttcactcggcgagtttcctgtgcgggtctatcgtcaaaatgtaaagtggcatgagctaggcgttgaggaagtgctgtctccgggtcagcacaaggtacgggtctacaatattgagcgaaccctctgtgatattttacgagcgcgtgattcatcagattcggaaactattcgtcaagcaatgattagctattcgcagctaaagcaaaaagatattgggcggctggtacgctatgcagatttgttcaaagttagagaaaaaatcaacaactacatggaggtactactgtgaaactaggtttttcaaatgggcaacagttcaaagccaaggtgcgtaaccttgccaaggaaaagcagattgatccccaaatattgatgcaagaggtggcgttagacgagattgtagatcgtatttctcgttcgccttaccgggataacttgattctcaaaggcgggtttctaatcgcgtcaatgctaggtgttgatacacgggcaactcgtgacgttgatacctcgatcaaaggcttgccggtaacaaaagaggaaatcctcaaagtgtttacggacatcgctgatatgaacgagccagacagcgacgtaacaatcagaattgctaagattgacgatattcgtgtcgccgcagaatacgctgggtttcgcattcatatcgaagcaaagatctacaacagcgtcgtagatacgaagatcgatgtttcaacgggggacacaatcacgccccgcgaaatttcatggcatcatcgtacgatttttaatgatcaagatattctagttatggcttacaatatggagaccattcttgccgagaaactcgaatccatggttgtgcggcaagaacttaattcgcgtatgaaagacttctacgacttgtatctgttcgataaggtgcaacggcagaatattgatttcaaagtcttaaaggatgcattgcacgcgacggcggatcttcgtggttcggaagcactgttgccgcgatactcagaaatcattgcaacattgcgtgggtctgtgctattgaaacagcgctgggaaaagtaccgagtggcctacgtatacagtgagaacgtcacttatgaagccacctgcgatgctgcattagatctggtgaacgagatcggattaccatagatctactcctcatcgccttcatctgcgacattggtgtaagtcatgaccaagccaccgtcgtcgccagtagtgacgttgaaccaaaagcgcttcggaaaacgatcagcggtaaggccgccgggagcgcccatccagatccgtgaatctgggtactcgtgggcgtgcattgccatccattcaagttggtcttccgcgtcttcgtcggattggaaaggcaagttctcgtgaaagtcgttgaggaattgcgcgtggttttcgattttgacatcagtgctcatttgatacctcctgttctgttggggttgcgggtacggtattggctacggcaacaatttcggtgaggaaatcatagccgcgcggcactagtggtgtgtaaaattcagagatcacgctgccgcaagtgtccacatagccgcgtcccttgatcggtttttgaaagaagtctttattggtttcgccgaacatcatggaatagcccagctcactcatgcgcccaagcgcaacgcggaacatgaactgatctcttatcccgtcgcctaaatattttgcgtcaggccgttggcaagccaacacgaggaagaagccggcttgacggccaagcatgacaatctgtttgagcttggacatgacttgcatagcatcgcggccaagcatatccatgaaggcgacatattcatcaaaaatcagaaagtgggcgggtagtccaagataggcgtagttctcgccggtcttgtacccgtccatttgtttcattttgtcgttgcgcgccatcatgtcctgatagaaggtttcaagcgcaccaagcatggcctccttcttcgagtagacccctggcatcacgtctgccagatcggcaaggtcggcatttttcgggtcaagaatggtgagttgggcaccgtctttcagaagtgcttcaatcaacgtcaaaatgaagtaggtcttcccaccaccagtgccaccagcgattaacatgtgaggcagtgcgtcatagtgccaagccacagtttccatgagctgaatggagccgtgttcacaggtcacgtcagcaatggtgatacgcttgccgatcgtgtcgtaaagcaaggtgtactcgacataagaatcgtgcaagatcttgtctaccagctcacagtaaagaccggcttcgagcttcttttccaagtgcaggagctgatcttgataggaagacatgacgatttcaacggaaacgtggatcagcccgtctttgagccggtagtagattttgggaaagtgcgagatcttctctttggtgcgcgttgagcctaagtccttgaagaaactctcgctgttggtttggtcagtttggtaccatttattctccatgatcatgcgggcgagcttttggcggtgttccatctgcttgtaggaatccgcaaaccaagttcgatatgaccacaagccagcgccaaagagtagcgctgtgcataaactgttaataatcagcggtagccatgaccaaggcaaggcggccacgtccggccaactaaacaacttccagttgatttgtcttagcagcggccaataggcaatggcagctccagttacccacaagcaaaccacaaccgtcatcgccgtgttgtagagtaagttgcgttgacggggatagacccgtgtaccgcgatacgtgagtttcattcgtcaatgttcactccgtcgtagccaatcacgagaccaagtggactacttgaaacgttgaaactaaagcgcgcgccttgaaggtaggcttcgggtttcgcacactgctcgctggctaaaatcaggtcacaagcattcatgccagcttgaatcgcgtgattagctgcgtcgattaagttgatgatgacgtcaccagtgggtgatgcaccgttgtcaaagtcagcgatgtgttcgtagtgaaattgaaagtcgtccaggttgacgagggttacttgatcattcatagaaattctcctttgggcgttacttgacgccaatatatttgatagcgggttgtcggtcttcggtgtcgatattgaaactgaactctttggattcatgatcgcgggtacattcgccgtctacccaaatggaaaatggttcatcaggattggcctgttcggcggccatcagtaccatgtcgatcaaagcgtcagggctggggtcgtggtaatcagggtcaactagttcgggatagtcctccaaaaagccgtcaatgcttagtgcttgtgccatgtcatcagtcctttcattcatcgctgacgcccagatacgagagccgcaagccatcttcaccttcgtatgaagtgaacgagaacagcttattcatgccgtcgttggtctgttcactgtcgaaatgtaggtgttggtaagattcagggctttcttccatgagttccaccatgtcttgcagaatctcgtctgggtcaaggcggtagtcgttgtcgatttcttcgttatagtcgtcgatgaacacttcacgaccaactacggtcaatgtggaagtcatcatctatggtcaactcctttcatgagtggtaagcaaccgccgcagcgggcggcgcgcgtgaggagtggggcaatgagctatttcttgtcattgttgcttggcttctcctgtggcttgaccggtgcggtggcaatcacgagatccttggccttcatgtaccacgaagtttcgacgcggttgaagttcgcgtttgccacggtgtcgatcactgggtcaaccaaagtaacaatctggttgtacttaaagtctttgaccccagcttctgccggaattgaaacttggatcatcattccttgtttcatggacttcaagtcataggtgcgttccttcacgtcgtcggtacgattgccgtcttcgtcttgcacgaagcgttcgcggcgctggccggagaatttcaagacgccaaaggtttcttcaagatcgataacgatgccttctgctaatcgcatgtgagttcctcttttcttttatttggctgggacaatatcgtcggcattgcagatgtagcgcacaaaggcttgttcaccgatccggtagccgacggtcgcaatgcgcggcttgatgatggtgactggtgcatcaacttcaatgctttcggccttgtcacctttcttcgctggaatggtgatctcgatgttgtcggtacgctgcaagtcggagaacaactcgtaagtgcgggagacaaccttgcgattgtcgcgatcaccttctgacagttcgcgcttgagcgaaccgaagtacaggtggccgaacgtcttttcaatatttggtgcaacaaatttaagttccatgttgtagccttcctttcgtattcaaaaagccgggtagtggggctactcggctgtggcttggtgatagtattcggttagttgttgaagtaggtagtcgtaaaacgacttggaaattgggtgaaccgtgcgaccatcagcgtatcgtggaaactggatataccagcgatactgaccttcgatgagcttcacgtttttcaagatgagcacatgatccagtacgatgtcgccatggagcagtacgtcgccaccgggatcagggtacatattgatagaagaaatgcgcatgttacttgccgtctttcttcttggcaccaccgatcacaaccattgcagcgaggacgccgagcagcagcactacaccgatgacgatgagccagccggaggtcgcgttaccggtttgtgggaggccaggcttaggtgtctgcttgtcggtcatgacggccttcacgatttcgccatccttagtgatctcgaatggcacgagggcttcactaatttcgtagccctttggtgcgtcgtattcttggaagctgtacttgccagcaggcaaattgccgaaggagaagcccccgttcttgtcggtgcgaccagatacgaccgtcttgccgttttcgtccagaatgcggatgccggtgtttggcagccgcttcccagtagaaacgtcggtcttggtcagttcgcctgtgcctttgatcaagtcgttggtcagttcaaaggcaatcgcgggttccttggcgtcagatttggtctcgccgatctgcttgtctttgttattaaacactgtcacgccgtccttggtagatacgagcttgagggtttccttataaagaacaaggttagtagcagaaggcttggattcacggagatagaaggtgcccacaggcaagtgcttgatggagccagtggaatccttgcaaacggtgatggtctgaatgacctttttgtcagcgtcaagcagttcaaaaatcgcaccagcagcgttaccggtcatcgcgtaggagtagcccttacccgaaaccagcgtggcaacttcattgatcttcttgaatgacagttcgttttcgtggagcttgttgtcgatcaccttaccgtcattgaggtcgatgtgtttgatcttctcgttgtcggtggtgtggaaatggaagccgtacatggtggtgttcaagtcgtgcttctcaccggcgtcaagttccttgacatagtagtagccttctggcaactggatcgcaccaaattcagccttaccgtctttgaccgtcgtggtggcaacgagtgattcagaaggaatcacagtgtcgccgatcgtggtttcgccttgagtgaacaagccgaagacctgaccattggcagcgacgttcttgatttctgggaggttgtctttccaaccggcgatgctttcttcttgcttgttgagcgtgatgtcgagttgttgaaagtcgttcttggcttcaagtgaggtggaggtcaccgtcacttcttgcccggcatacttgagttcaaaagcgatcggctcagggttcatgatgaaaccatttggcgcagacaattcagtggcagtgtacttgccgaggtacagctctggggtctggatttggccttgagcgtcagtggtgccagtagcaaccacgtcacccttgtgggcacgaacggtgccgtcagcagtcgtaatatcttcggctgctttgaactcgaacttcgcaccagcgagggcggtgtaatcgtacttaaacttgtactgatcgccgtattcagtttcaaccttttcgacggcgactggggtagccccggtcttggtcaaggtggcgacacccttttgggagaggtcagcgaacttgatgaccacgatgccgtccttatggctaccgtcgatggtgaacttggctggttccttagccagtacatagctttctggggcttggacttcttcgagctggtacttgccgtagccaagcgcttcggcggtgatcagctcgccggagttgtcagtagcaaacttgtcagttgtaccagtcttgtcggcagttggctggacttcgtacttgttggtttgcaagttcttgatccggaaaatcgcgccagtgcgcagcacgggcttaccggtttcggtatcgaccttaacaacacgcagcttttcttcgataaccttgttttcgatgctgtaatgctgggacttttgggtaccgtcaaccgtgactgtgaacggcttgatgccgttatagccggttggagtcttggtttcagtgacggtgtaggtgtcgtaaggcaaatccgcgaacttcacgtaaccctgtgcatcggtgaggccagtgcgaacaaccttgccagtggtcttgctggtgacagtgaactgggtgccctttagcatgactggcttagtgcctttgccttgagttgcccagtcgtagttaccgtacttgagcaagtcgaggtcgccagtgatgacttgttccttgaccgtcgtggtagcggcggtagtggtcacgttctgcccagcgtatgccagcttgaagggatgcttttgcggatcaagcacgtagccagtcggtgccttcacttcttgccagtagtaatcgtccagttccaaaccggaaacagaagcgatgttgttggcaatcgtcaccgacttcacgagcttgtcatcggctgcacggtggagttcgtagacagcgcggttaaggctggcagcgccttgtggctgcttacccgtaacggtgtcaactttttcgatggtggcggtgccgcgttgttcttgatcagtcgtatcgacgtgagcagtagtgaccgcgacagtttgaccagcatacttcaattcaaacggcagcttggctgtattcagaacgtagccagcaggagctttttcttccagcgcgtagtagctaccaagcttgagattctgcaaggtgcctctgccgttaccgtcagtggtgattgcgccaacccgtgtgccggtgcttgtgtaaatgccgtagacagcaccattaagcgagtagtaggcattgaacatgtcgctaccgaactcacgcccaatcttggcgagggtcacgttaccgagctgttccttgttgccgaggacaacttcaacggtcttgccgggttcgatggtgacttccttgagttcacccttgttgacgtagccgttaggggcagtgacttcgctgatcttgatcttggtaccagctttgatcccattcagagcagcatagccgtcagtgccagttgtgacttcctttgtggtgccagcgtattcaaacttgagcttagcacccggtagcgccttgttggtgtcggcgtcaaccttcttggccttcacgttaccgttcaagttgaccttgattggcaggctaaactcaccgttgttggagagcttgaagttgacgagtttttgttgtgagcctttcgtgtagacgaaagaagtaccaacgtcagcggcctttgcaatcgcgtaagccaccttgccggattccttcgactgggcagtagccgtcagcgtgagcttgttgccggacttggtgatcttgaggttcgcggtgtttgccgtttgctgggcgaaagctgcgagccgtccgttggtgtcagtcaacgtgattgaatcaccaacggcgagcgtgatctgtttgccgttgaaagacggcttacgatcatgcgcggcgaccttatcgagaatcgctttcttttcagactgataggtcttgtttggtgtggtgagcaacgaatcgccgagcgtttcccaaataatcatctgggtcacggcgtagttgcgattggttggtttttggtagtagccgtagtaagcgatcttggctagttgatccttcttagcgtcggagtaggcgctggggttgtagccagagccgctcatatcgagatcgaccccgtgctccacacagaaggcaactttgccgtccacctttttcatccacataccggtgtccgtccaatgtaagccattgaacagatgcaggtgccaagtatttcgccagtcagcgaccttggtgttggtcatactggcggcgagagcgattgaggcggggacaaagagttggacgaatagcataatcaatgcggcgaaaattgaggttcgccgagctgctttcatcaatgtaatttcctccatatttagtgatttgttcttgattaaaacgaattttgaggacaaaaaaagcaggtctggttacaacctgctttacgttcatttgtgcgtttgctttgcgttaatcgtagctttacgaaatgcccattttgtaccaaattagggcgtcacgctcaaaactcgttgaaattccataaaagtgagtgaatagaaacgttgatataaagggactttgaaactcggtgaaaccgtataaaaccgaggaacgtaaagtacggtcttaagaaagctcgtaaagcttcacaattcagtaaacgttaatatcacttttatatcaatgtttacaagcacctcgcaattttatattgcggggtgtttttttgtttttgacaccatcggaatttttaagtgtaagcctaatgcgccatcccagcctattcccaatatttttgctatgcttagagtaattgaaggaggcttttttatgtatcgttatgccgttatttataatccccactctgggcacaacaatggtgagtcggttggtcagaaaattgagcaggcactcatcaagaatcaacacaaggtcgaactgatgccgacggaagggccgaaagatgcaacgcggttagctaaaaaagcggcgcgggcaggctttgatgtggtggtcgctgtcggcggggatgggaccattaatgaagtcgttagtggtcttgcgacgttagatcagccgccttatttaggcattgtacctgctgggaccgtgaataatttggcgcggatgttacaaatcccgttggacattgatcaagcgattgaaaatctgcagcaggttcatctgcgcccactcgacgtcggccaagtgaacgatgattacttgattagtacaatgacattgggcattttggcggacgccgcgttgaacgtgactcagagtgaaaaacaaaaatgggggccgctagcttttttaagcaaaggcatccatgcattagcggagcatcagcattatccgctaacgattgaaacgcctgatcggcactggcaaaaagacacgcaattcttgctggtgaccctcacgaattccgttggtggatttaccaacttcaatcccgaagcgcaacccgatgatggttatttccatgtcttcgttgcgccgaaaatgtcgctagcacggtcagtgatgtttctcccttatttcttaacgggtaattttaaaaagattcccgggatgacttactttaaagcgaatgaaatcagcatcacagtcgacaatcagcaaagtgcacaaacccgcattgatggtgatccgagtgccaagtcaccattggagatgcgactcttagaacataagttgcaagtgattacgcctaatccggatttataagactaggggtaggttagagtcatcggtaaaacaaaaaagaattcaaaattttctaacgaaaattccgaattcttttttaattattgcgttaattcagcttgtttggccgcaacgcgttcactaatcttcaggaatggccagtagattagaacgccaaggattaaagtgaagccttgaatcacaggggcgcgccaatcgccgccggttgctaaataggagttgagtaatggtggtgtggtccaaggtaccatgacgactactcgattcatccagccaattgcggtgaagaagtaggcaatactgatgccaagtcctggcattaggacaaatggaatgatgagcgcaaagttgaagacaattggataaccgaaaataacaggttcgttaatgttaaataaacttgggacgaatgatagctttgtaatatcacgactagcgcgtgattttgagaagagcaaggtcgcaatcaataaacaaatagtactaccggtaccaccaagcatcccaaatgtatcgcggaaaacgttgttgatgatataagggatgtgttgaccagctgcgtaagctgccatatttttgttcatgttgatcagtaagactggatccaataaagtaccgttaatgacagcttgatggatcccaaatgagaagaggagattaccagtcccgtaaatcaaaaggagacccggtaaacttgtattaacgcgccgaagtggttcttgaatcacatttgtaattaaagtgatgagatcagtgtggaaaccagccgttaaaatcgcagcaagtgccgcaaaaagactcattgtaatgaggtctggaatcattgtgttgaaggaaccagcaacagctgatgggacggcatcactcaagttaatctgtaattttttaagctttgaaagagtcataaagagttctgttgcgactaaaccaataataatgccggcaaacattccggttgttcccacgttttggaaagttaagaggccagaaacttcgacggcttttttggcagctagtggtgtgaccggaacagtattaggcatcatgatgattaaagtccctagtgccatgacagccgcggaaattttgttgacgtaattcttattacgcgctaaacagtagccgattgtaggtgtgagtaatagcccagcaacgttcaaagtcccattggtaatgtaagtgccgaagtattgaaagttggttagcatttggccgtggaggacccaggggaatacaacgttattcacgagcaccccaattccggcgaggatgaatagtggcataataatcgcgaaggcatcacgtaatgaacgcaaatgcacttgattcccgattttaaaggcgatatttgtaaactgatcaataaatctttgtcgccgacttccttgtttaagcatagaaaacactccttttaacgcactttttttagtctaattgttcaccgttagattgaatgaccttttgcagccaataaaaactagccttcggaattctagaaaggtctttgaggtcgtgattggttcgattgacataaacgacgccatagcgtttattcatatcaccttttgaacttggaatgtcgattaacccccaaccaagatagcccataacgtgagcgccgtcttcatcaactgcgtctttcaaagcctggatatggtcgcggtgataggcaatccgttcgtcatcttggatcacttcgtgattcagtgattcttcgcgaatgccaatcccgttttcgattggaaaaatggggagggcagtttcatttgaaagtttcgttaagacatttctaaaaccgagggcgtcaatctgccagccccattcgctactttctaaataaggattagggacactcgcatcgcgcatgtaataattgggtggtgtgttgggggttaattttgtgtgatcgagtgcgacagtgtagtagtaactgaacgctaagaagtcattatggtgactcgcgattaacgccaaatcgtttggctgaatgctactcattaagtcatgattttgcatatattgcagtacttcggctgaatagtgaccttttgtaaaggcgtcgacgaaatgttggttgataaattctgatgcttttctagcagcaaagacatcttgggggtgactggttgcaggatagaattcttgataggctaacatcccaccaatttggtcattagggtagtgggcgtgtaagtaattggcgatttcagcatgcgcaaccattgtattattagcgatcgtataaagggttaataagtcgcgctctccgttgataaagccagtattatcaaagccaggttcaaagaaaaaaccattttgttcattaaagcttagccaatatttgacttgtccaccataacggtcaatgacagccttagcgaacttagtgaatgcttgtgtgacataccgacttgagaaaccattatatttttcagctaatgagtgaggctttttttgttgcattgatttgaagttgttgacaaaaattcatatcaatggtttaatggtttaaacttatgaaccattaaaataaaaccggagattaatgtatggatgaaatgaaggttattaaacagagctttgctgagctgagcccgtttttgacggcgcttggggatgagaagcggcagagtattattttagaattgatggctgataaagcttgtgatggcttacaggtcacggatttaatggcggcgtcggacttgtcgcgcccggcagtgtcgcatcatttgaaagtgttgaaggaagccaacttggtcgactttagacgcgaaggcacgaagaactattattacttgcaacacgaactgggcgaaatcaatcaactaaaaacactgctggatcagattacggcagtcatcgaaaaacaacagtaaaaggagtttttaaaatgcaaaccatcttaggtagtagcggtcagattggccaagagttagccaaggcacttcataaggacttcacaacggacattcgactggtcagtcggaatccaaaaaagtgaacgcgaacgatcaactatttccagcaaacttgctcgacgccgcccaaactgatcgtacggttgcaggcagtgaaattgtttattttaccgctggcttaccgatgaattcagacatgtgggaagcgcaatttcacattatgatgactaacgtgattaacgcgtgcgtcgcgcacaaggccaagctcgtctttttcgataatacctatatgtatgcgaaaaatagcacgctccagacagaagcgagtccttttgaacccgttggccgcaaagcggttgtccgagcggagatcgcacagttgttacttgataagatggcaactggcgcaattgaagcggtcatttgtcgtgcacctgaattttatggcccaggcaagacgcaaagcattacgaacacaatggtctttaacaatatcaaggcgggcaaaaaggtgcgcgtgccattgaatgatcaagcggttcggacattaatttggacgccagatgctagtcgtgcgatggcgttgattggcaatacgctggatgcgtttggtcaaacgtggcacctcccttgtgatgacggtaaaacatacgccgaaatcatcgcgctagcaggcaccttaacgcatcaaccaatcgactacaccgttttaaaaatgtggcagttcaacatcggtagctggttcagcaaaccgctaaaggaattaaaagaactcctacctagatatgaagtagataatctgttcagttcagacaagtttaagaaacggttcccagaatttaaggtgacgacgattgaagaaggggttcaggagattctttaaaaagtcagcctttcgctcgatagactaaccattgttcaatattatataatcgctttaaagtagcgatgttagtcaatcagataaggagcgtggcatgatgaagaaaccttttaataagcaacaagtgaatggtgaaccaaatccggaatttgattccttctttgcggaagtcttaaagaagttgccgcaacaatcggcagctgtgattgcgaagtcttttaaccagtccaaagcattggcggaaaagacgatggcgaagagtcggacacagtttgatggggtctttgaagacttcctagtcggtgtggatgatcagatgcgtaaaaaggcacacaatatcattcacgcagcatcactaacagcagcgattattggctgttcaccaattccattttccgatgcgttcttgttggtgccggttcaattaacgatgatggcgcgtttgcataaactattcggtcaatcttggtcggctagtttgggtaagagcctgtcgaaagaattggtactcgttggcctaggtcggagtgcagtcggtaacattctaaaactggtaccggtcgttggaacggtcaccggatccgcggtcaatgcgaccgttgcgatgtcgattaccgaagcgctcggctggttaacggtcaagatgttgaacgacggcgaggacatcttcaatgatgttgtttcatttaaaaatcaattcagaacgctatttggattgttacggcgtaagtagttatttttcaattgacagaataagaacgaaatgatttaataaacccacatcactaatttttaggaggctaaccagatgcccaaagtactaattgtccacacgaatgttacgcgttatcaaggaaccaccgatccaaccggattatggctgggggaatccgcagagttcgttgatgaattgcaaaaagcggggattgattacgattttgtcagtcctaaaggcggcttcgtcccgcttgatccacgggggatgaagtacacggatgaatcaattctgaccatctatgaacaaccggattacgtgcaacgggggttagtcgcaacgctgaagccaagcgatatcaatccagctgattacgctgcgatttactatacgggcggccatggtgtgatgtgggattttcctgataatccagaattacaaacaattgcccgggaaatttataatcacggtggctatcttgcgtccgtttgtcacgggatcgcgggtttactacgcattaaaaatgatgacgggcagtatctgattgctggtaaaaaagtgactgggtttaccactgcagaagaaattattgcgggcaagaaaaaagtggtgccatttttaaatcaagaagtggcaacccaaaacggcgcgcaatttgtgcaaaaacggttttacaaaccatttgctgtccaggatggtcagttgattacggggcaaaacccgttttctgtacgagaagtgacgaagcgcttgattccgaccctacaaaataacggttaggcattctttgaattctatgctaatcttatagaatgtagaaaagttaggagtcagaagatgagtgaaaaacaaacaccaaaattaacgcaaaaagaaaaaatgcaagcactaattgatcagaaaaaaggtggcggcagatcaaaacagaccgacgttgctaaaaatgatcggacaaagatgcgcaaaggaccaaagatttttaacgaaatccactggtaaagagtgcgtttggttgcggttagcaactgagcattaagctaaaatccgcagtaatccaggttttaggagtactgcggattttagcttaagcggaagttgttgcaaccaaaaagcacgtttcaaacaaagtgcgtttgaaacggtttggttctgagcattaacctaaaaataagcactatggcggtccttgccatagtgcttattttgtagttaagcacaggagccagtttcaaaaagcacgtttttgggctagggcaattttgcgctagccctttttgtgttaacgcgctatgctagaagcaacttattttaaatcgaatggagtctttgtatgtcatctttaatcgaacaaatgcaacaccatgtttcagttcgtgatttcgagccaacacccctcagcacgacagtgaaacaacaactcattgcggcagctcaaagtgggtcttcttcgaatttcgttcaggcattttcaatcattgaagtgaccgatcccgtaattcgtgatgaaatcgcaacgatttctcaaagtgcggcgtatgttaaacagacggggacgttctatgtttttgtcgcggacttataccgacaagccacactcttagaaaaagcgggccagtcagtagctggcattcaaaatatggaagccttattagtcgcaacagtcgacacagccattgcagcagaggacatggcagtcgctgccgaatcgttagacttaggcatctgttatatcggtgggattcgcaatgacattgcgcgtgtcgctgaactactcgagttgcccgcctataccgtcccactatttgggttaacggtcgggattccgaagactaaaaatcaggttaaaccacgattgccgcaagttaatcaagtcgctcaaaatcaatatgatgtgcatcaggcaaccaacctagtgcaatacgatcaacaaatgcaaaattattatgctaatcgtgggaccaatcagcaacaaactgattggtcgaccaagaatacggccttctttagtgaagtgcgacgaccagcagtggcgagttttttgaaaaaacagggctttacgttgaattaagaaaaaatggtacttatcttaaaggacaatcagttttctgattgtcttttttttgtgtcgtgcaagctcggatatgcgataataaaactagtcaaatgtaaccggttaaataggtataggagtgatcgttatgagtttaattgatgtacgacatgtagccaagcggtatcagatgggcgagacaacaatcgtggccaatcatgatattagttttacagtcaatgaaggggagttagcggtgattctcggaccgagtggtgcgggaaaatcgacagtgctgaacatcttaggtgggatggatacacccgatgaagggcaagtgttgattgatggtgtcgatattgcgcagtttagtgcgcaccaattgacggcgtttcgccggactgatgtcgggtttgtgttccaattttacaatttagtgccgaatttaacgacgcaagaaaatgtggcgctggcaacggctgtctcgccgaatgccttagatgttgcgcttgttttgcaacaagttggtctgcaggatcggcttcagaattttccggcccaactatccggtggggagcaacaacgggtggcgattgcgcgggcacttgctaagaatccgaagctcctcttgtgtgatgaaccaactggcgcactcgattatgaaacgggtaagcagattcttaaattattacaagaagttagtcggcaacaacaccggaccgttgttttgattacgcacaatgccgcgattgcccagatggctgatcgcgtgatttacattaacgatgcgcgcgtgcgttcaattgaagtgaatcccaacccacttccagttgaaaagattgaatggtaggtggttaatatgcagacacgtttatatttacaaaccacattccgcgatattcggcaggcgattggacggttcattgcgattatcctgattattttaatgggtgtcttattgtttgtggggattaaatcgattggcccgaacttagaagagactgtggatcattttgtcaccacgcaacgcgtatccgatttacagattagtgggaccgctggcttaacggaacaggaccgtgcggtggtcgaaaaaatgcatggtgtccaagctgaattgggttatcggattccgtatcgcgatgaagcgcgggatgttaacttacaattatataattaccaaccaactgcacggcaaaatcgcttaacgctgactaccgggcgctatccgcaacgaacgaatgaaattttagtggataacgcggtcaagacgtattatcgtctggggcagagggtgacggttaagagtcagcagctattgacgcaccggtttaaagtggtcggttatgtggactcaccgctatatatcgaccgtcaggaacgtggaaccgtaccggtcggggatggtcagctagatggctttatgtatttgccacaaaaggcatttgcacctcaaccgtattcggtgatgatggtgcgctttagtgatttggatcgtcacagtagctttttacaggcttatcgcaccggcattgcgactaaagaaacacagctcatgcgccaattaaaagcacacacaactcagccgcagcaacagtacttactaactgcgcgcagtgctaatccgggttttaatgaatttacgagcttgtcggatcgcatcgatgcgatagggaatgtctttccggtcttctttttcttaatcgggattctaattacctttacaaccattacgcggatgatcgaagaaaatcgtaaggaaatcgggacattgaaggcactaggctatcgtaattgggaaattgcgcagaagtatttactatatgcgctactaacaggtagtatcggcaccgtgcttggcaccattttgggcacgaagttattaccgctagtcgtctatcgaatccaaaaaccggtctacacctttgcgcattatccaacccatttttggacagttccaattttattagccactggagcggtcttgattgcgacagttggggccacggggtatgttttaatccgcgatttacgcgagaagcccacccaattactccgaccaaaagcgccgaaaccaggccaacggatttggttagaaagaatcacaccgctctggcggcgattgagtttccatcaaaaagtaacttatcgtaatctttttcgctataaagcacggatgattctgaccatcttaggcatcgctgggtgtaccggtttaatggttgcaggctttggtttaaagacgtcaattggcgaagttgctgaccgtcagtttaagcaattgacccattaccaagcaattgtgacgcttaaaataccgaatagtacagcccaaacgaagtcgattttaacacagactgagaaggttcggtcttacttaccggtcacaatgacccaggttaagttcaagcaaaaagggattacggatcaagcggcgacagtctgtgcggtcgctgatcaagcaaaacttgcacagtacgtcgctttgcaaacaccgcgagaacaacaacgactcacattgccgaaacacggtgcgattattgctgcgaacctcgctaaaacatatgctgttcaaaaaggcgattggttaacgctacaaacggcacaggggaaacgtgctcgcattcaagttgcagggatcagtgaaaattatctcggtaatagtgtctatctccgccaatctgctctttcaaaaacgctacaacaaccagttgcggctaatgcctatctcgtgcgcaccgctaagatgactaccaagcaagaaaaacagttggcgacccgtttgcaacaaacaacggaagtggcggccacaacgtttatcagtgatcaaggggctaagcaagcaacggctagtgctaatttagacccaatcgtttttattttcatcgggttatcagcggttttagcgtttgtcgtcttattcaaccttactagcatcaacgtttcagagcgggaacgtgaattggcaacgattaaagtcctgggctttttcgacaaagaagtgacggcctatattgtgcgagaaaatgtaatcttcaccgttattgggattgtgcttggctttggaatcggtaaattgctgacttggttcatcatcacgatggcctcgtcagaacaagtggcctttccactcatcattccagctagcggctacctgattgcggcagggatgacggtgctattttcactgattgtgatggggatgacccatcgcaagttaaaagggattgatatgattggtgcattaaaggagaacgaataaaagttttagcaaataatgcttttttacttgcttgtgacgttacgtcatcggctagtatcaaggtatggaggtgatattctatggcgcaatatacaacaggtgaactcgctaaattatgtaatgtttcggtgcggacggtgcaatactacgatcaggcggatttgttgaagccggcaagcttaactgaaaatggacgacggctgtatggggatgcgcaagtgcagacgttaaaagtcattctaggctacaagcagctaggcttttcactgaaggcaattcaaaaagtgatggcgagtcaagcttcgacggatacactggcattgttagtcgaacaacaactcaatcagttagtccaaaaagaaacagacttagctaaccagaaagcagcgttgcagtttgtactgcaatcgattcaaaatactagcgcggtgccttttgaaatgacaatcagcgacatagaagacgcaatggctaaaacaacacagttaaaaagattacatcggcgaatgctgatgtggggcttattgattgatggtgtggaaattggcttattaattcttgggtttctaagtggcatttggtggccaatgtggattgggataccggtcatcattgcgatggccatttatgtgacaacattctactatcaagaaactgtctatctatgtcccaattgcaagacggtcttcaaaccacgcctaagtaaaatgttctttgcccggcacacgccaaagacaagacaactagtgtgtccaagctgtggacaaaaaaattactgcatagaacagagtgcgtaagcaggcgttcgtatttttaggattaactggatttgccgaattggcgacgcaatcgctaatttggcaaatttggttagccacagaaatatgcctgctgaagcacgtttaagaacagagtgcgtttggtcgcggttagcaaatgagcattaagacaaaatcaccagtaatccgtttttggagttactggtgattttagcttaagcggaagttgttgcgaccaaaaagcacgtttgaaccaggtgtgcgcatcaaacccaaaaccatctaagctgggacgatttcgtctcagtttttttgagtcagatactttataatagaagtattacaaaaataaggaatgatgcaaatggaaacgacagtgatcatctcgacgctctttcggttggcaaaagtcttcgatgacatgggtaagttattgttcaaagcgcatttagatgtgccgttgacgtttgaccgtgcgcaatcgcaggccttattacggcgcaataaccgactagaattcagctatcaacaacttaaaacaagtaaaacaaaactattaaatcaattattggcgacggcgggagccgatccctatttgtggaccaagttacggcgactgcaggcattggatgtggcgagtttggcagccgttcaagcaaatccgcaatttaaccgccaacgcaagattaatcgtttgaaacaactgattatcaatttacaaaatgaaaaaatcaatgagagtacggtactgacgaagcaggcgctcgcctatttataccatgtagcccctgataaagtggcggccacgagtaagccaggaccgatactggccgatccgtttgatagccgcgcttttaaaatggacatgatggcccttaattatttagatcagtattttaacgtgcaggaattgcaatattacgtgaagtacctcgtgtttattcacgcgcatcaagcggcggaagcggtgattcactatgacgcgcgaacggttttgccgaatgcggaacaaactggtttttcggcaattgcctattacgtcacgcttaatcgccaatcgtatacctacatttcctacaaggggactgaggggacgatggatgatccgcggattaagtcgtttacgcagcggctggataattatgtccgtgagagttatcaagattggaagtataatattgatgcgatgctaattggcaacaccgaaaatgatgagcaactccaactcgcacggcggtttacgcggtatgtggtccggcgggtgcgccgaattaatccggcaacaatcatctatggactgggtcactcactcggggggcattttgtgcagacggtccaattattggatgaaccgtttgatggtggctataccttgaatgctgccccggttcagttaaaacaaataaagcattatcggccggatcttttatccgcttcaaaatggcaacaattattcgcattgactaagcacaacaatacgcaagatccagctgtagcaatgcaagtccacgcgattttgggacataattacgctacaattgaaaatgaatggttcattaaagatttaacgcggatctattttggctttccgtatacgttctacattgggacggcgcgttatttgaatgctaaaaattggcattacccgtttgtgactgacgtagcaccatatctccgaaaagatgagattcaggcgtatagccagttctggggcaatctaattcgctatttgaaacgtgttgagactagaaatgggtcgttgatgttggcaagtctgatgacatatggactgcagacactccgtgaagtgtatgccgcgattaaaacggaacaggcccaacaaatttttgcggcatatgcgcgctatttatacgatgcgcacatttttaaagacacccccgttcaggtacagaccaattttgaacgggaattatcacggccgcgcacggcactccgtgtgttacaaggcgaatggccatttttgaaaagcgtcaacaatgagatggtcgaaacggtgattttcttccacacgattgaaggcgctcaatactttacacgctagacagatgggatgttaactaatggatatttatttgaaacaagcaattttacaagtggtcgaccgcgaactcggcgatccaatttactcacaacaggtgctagatcttaccaatgggaatacacgcgactatttaaccaacaagattaagaaattatcgtctgcccagagtaagaccggcgtgctgcgccaagatgctgagctcgcatcttttctgcgcgatgcgacagctgattttatcggcgctagccaacgcctcgttgaaaaatggtacacggtctatcaaaaaagtgacgatgcaccgagtgcggatgcgtttgttgtcttgtatgaacaagatgcgcaagcttacttggcttttttgaaggtcgattatcatcaagccttcacccattatgtcaatgctgaagagggaccattgatgaatcaactgattattcaccaatcgattctatcgaataaaacgcaaaaggcggacgaagggtttgcgattaacctccagacgtttggctttgaattgatggagaagaagtacaccttctccggtgaaaagatgacctacttatcaacgaacgtgattgaaagcgaaccagcgccatcgctagaagaaaacgtcaaggttgttaaaaaagccgctgaaaaaatcggcaagaaattcgaagttgccaaacacgatgtggtcgccaacgtcaaagaagcgatctacgacacgattgaaaccaatggagaaatcgatacgagccagatggcggcgaagatttttaaagacaacgtttcagcccaaagtgagtttaaagcagaaatgacggaaaacgcgccagcagcaccagcgccaatctcaccagccgtccgcgaaatcgccgaaaagaaatacggcaaacaaaaactcaaactctcaaacggcatcgaactaatcgtcccaatcgacgtctaccaaaacccaaatctatttgaattcatcaaccacccagacggcacaatgtcggtggagattaagaatgtagaagaagtgattagtagattatagagtgcgtagacaagcggttatattttgagcattaactggatttgcccaattggcgatgtaatcgccgattgggtgaatttggttaagtacagaaatatgcttgccgaagcacgtttagagtgcgtttgaagcgggtcgactttgaggattaacctaaaaatgtgacttatgacgggtttggtcataagtcacattttgtagttaaccggaaaagccagtttcgaaaagcacaccaaaaaagagcatttctctcatcctatcgagaagaacgctcttttactatgcctttctttttgcccagattaaacggataatcttatcgaattccgtgatgattagaatcaagaagcctgcgccgatcgaaacgccccattctaataaggtaagcggttcggtgtagaaggtttgttgcatgaatggcacgtaggtcaggatcaattggagaataatcatcagtgcgataatgccgaatgccttttggttggtgaagaaagcttttgaaaaggcgagtttcgcagtccgaatattgaacaagtagaaaatcttgctgatgacaatgatattgaccatcattgtgctggctgtgacttgatcgacaccgcggccgagtaaccaatcgtaggctaacaagccgattaaggccatcaagacggaaacatatgccatttggaaaacatcgtgtttattcatcagcgcttggccggtcttacgtggcttgcgggtcattaagccatcttcagctggttcgaagatgaaggcgaattgaatcgtaatcgccgagaccatgttaatccagagtaactgcgtcgcttgcaacggcatatcttgttgcatcaaaatcgtgaaggcgatgattaagccttccgcgaaggaagtcgggagtaagaagagaatactctttttgatgttatcgtaaatccggcggccttcacgaattgcgacggacattgttgcgaagttatcgttggttaaaatcatatccgcggaatctttggcaacatcggttcctttaattcccatggcaaccccgatgtcagcgcgcttcaatgcgggcgcatcattgacaccgtcaccggtcattgcggtgactttgcgactggcttgtaaggcttcgacaatttcgagtttgttatgtggtgtggtgcgggcaaagacttggtgttctaaagcggcttttggtttttcagcgtccgacaagcgatcccattccggcccggtaatcgcattaatcgttggtgctaagcctaacttttcaccaattgctttagccgtcagtggatggtcaccggtaatcatcttgacatcgaccccagcagcgttcatttcggcgagcgcttggatgacttcatcgcgtggcggatcgataatcccggcaacccctaagagttgaatcccttgttggagttgttcatgggtaattgtagcagtcgttgttggcacgtcgagataaccgaccgccacaacccgtttgccttgttctgataaacgggtcacatcggcattccagtcatcgattgggaaatcgaccattgcctgttgggccattgggaataatttatctggagaccctttgatatagattcggtgcgtaccatcagttagttgcacgagtttagcaatgtagcggtaatccgaatcgaaaggtaacatgtcaatttctgtatttgttggtaagtcgtcgataccatgaaccttatgatataaggttaaaaaggcaccgtcagttggttcaccgttaatggtccaaccattgtcggcttgataaagcgtcgtatcgttggcttcataactagcctctaagaattgtgtgagggtggtatccaattcagcaggttggtcatttaataaaatctgaccttcgggcgtatagccattcccgctgacttggtaagtcgtttcggcggtaataatttcggtcacggtcatttcgtttttagttagcgtccccgttttgtcggtcgcaatcacgtcgacggagcccaacgtttcaacggcaggtaagctcttgacgatggcgtgtttgtgcttggccatgtcgctgacccccattgcgaggattacggacattgttgcgggtaatccttcaggaattgaaccgaccaccatcgtgacaatcgcgattgctaatactgagagtgagtaatgttcgccaagtaagccgaagaggaataaaaagacggccgcaccgatgacgacaaatgaaacgccggtccctaagccgttgatttcgcgagtcaatggggttgggcgggttttcgtttcggtgacagcaactgagatttgcccgatttcggtatcagcggcggttgcgacgaccacgcctaagccgctcccgttagtgacggaagtggaggcaaaggccatgttgacttgatcggcaagggcaacttcttcttcggttaagcgtgttgcaattttttcaactgagtctgcttccccggttaaggctgattcttgaatacgcagattatcggcatcaacgattcgtaaatccgctggtacactatcgccagcttctaggaagataacgtcgccgaccactaagtcttcagttgggatgtcgatccgctgaccgtcacgataaacggttgcttcggttgccaacatttctttgattcgttccaaagcatcagatgcgttcgcttcttgataataaccaatgatggcattaatgatgactactagaccgatgatgatggcatccgaatagtgacccatcatgagtgttaatagggctgcgacgattaggatgtagatgattaagttgttgaattggcgcacgaaaagttgccacttcggggtgtgatggctctcgagtttattcggaccattggttgctaagcggttaaccgcttctgtttgcgaaagcccctgttcaaaatcttggtgggcataattggtttgcagttcgtctaatgtttgttgataagcgtgtgttttagtcatggtaagctccttttaattatcgaaagtcaaaatgcggtcgttcgtgatcgttattcttgccgataataaggaataatctgatggattaaacaaaacgcttcgcccgagccgtcatccaaaaatactcacctccagttagttattactctaaaattatcatgaaaaaatagcgatgtcaatctaatgaatactattaccaattcaacgtctaaactttgcgcccagtgtggctttgtggtaatattattacataagttaaaaaaacggttgaagcattgcgcgttcaagatttccttctttagggtggtagaagggaattttggcgtgctttttttatggagggaaatgaatcaatggcaactttagcaattattttaataagtactttattggcaggacacatgagcaaacggattggaatgccggctgtgattgggcaactcctggtagggattattcttggacccgcgttgttcggtgtcttacatgaaaattcttttatccacacgttttccgaaatcggtgtcgtgttattgatgttcatcgctggcttggagagtaacctgaccttgttgaagaagtatttcaaaccaagtttagtggtcgccgtcttaggggtgattgtcccggtgatcagtatgtatgggatgagcttggcctttggtattagtcaacttgagagtttattcatcggggtgatttttgcagccacctcagtatcgatttcagtcgaagttttacgtgaattaaacgtgttagaaagtaaagaagggacgattatactaggtgctgcggtagtggatgacttactggccgtaattatcttgagtgtcttgaccagtctttttggggcgcaactggctgcagctagttcaacccacatgagtttggggttgagtttattgctgcaagctttattcatggttgcggtctactttagtgtgaaatggattgtgccatttgttatgcatttgagtcgtcgtttgttagtaccatatgcgagcgccattacatcgttaatcatttgttttggatttgtttggttcgctgaggccgttgaattgagtgcggtagtgggcgcgtttttcgcagggattgcgatttcgcaaaccccgtataagaaagaaattaatcgccatattgaaccgatcgggtataccgtgtttattccggtattctttgtcagcatcggtttatcgatgaacttagcaagcttgaatcaacatattctatttattacgattttaaccgtgttagctgttttctcgaagttaattggaagtggtctcggtgcgcgttggatgaataattcgccacaaggagcctatacaattggtgcggcaatgatttcgcggggcgagatggcgttaattatcgcgcagattgggtacaacgctaaattgttgagtgaactttattactcagagattattttcgtgattatcattaccactgttttggcaccgctgattcttaaacacgcggtgaaacgccaattagcaactgaaatcaattaagaaaaatcgtcagctatttgctggcgattttttttgcccttttttaaagttgacaaaaaaaggattgagcagtactcttatcaagttaagaaaaacatgtatttaattacatgatatggaggtttttaaaatgacaaaacaatttaaagaattagaagatttcttagggacgcatttcatttacacttacgataatggttgggagtatgaatggtatgcaaagaacgaccacacagttgactaccgaattcatggtgggatggttgcaggtcgttgggttcgtgatcaagaagccaacatcgttaagttaacggacggcgtcttcaagattacttggacagaaccaactgggactgatgttgcgttggacttcatgccaaacgaaaacaagttacacggcatgattttcttccctaaatgggttgaagaacatccagaaatcacagtgacctaccaaaatgatcacattgcactcatggaagaatcacgtgaaaaatatgaaacatatcctaagatgttagtgcctgaatttgccacaatcacttatatgggtgatgcaggacaaaataacgaagacgtaattagcgaagcgccttatgaaggtatgattgaagatattcaagaaggccggtatttcgatgctgactatcgcaagattcaaaaataggcaatctgcttaaccaatcacaagcatctactaattatgacgataagtaaatagttgattttataaagcagtttcgttataatgaggtcatggttaaataaattaacgaggtgaactggacatggcgattcaagtaggtgatttagttcgcggccaatcaaacgaaattatgtctgcgacgtatatcggtaaggtcattgagaaatgtgaagaaactgtgcatatcttaatcttgaactatgcaccaactgatcgttttacggttcacgagttgatgcaacgaattctagtgaattcacaacaacttcgtacaatttcgttaacgaaataactccctaatacccatagatttctccctataaaaaaacgaccactcccaagaaaaggtcgttttttttatgcgcaaaaagcggtctaatcacaaaggtggcgcttgcatcttgttgctcgctcacttatagtgaaagataagtgatggcaggaggaatgtgcagtggttgaaaaaagaaagttaattgaaacagatcaaccagcattttatgaattagcacaatatgcgtttaataaaccggatagtgctaagcgccaagaattcttcaaacagttgtatacacatagtgcagggtttggcgtttttgatgacggccggttggcaagtggcttattagcgacgccgtttgacgtacggctcaatgggcaaacctttaagatgagtggcattggttatgtcgcgagttaccccgagtttgcgggcaaaggtgggattgcagcattgatgcaactcgcgtttgaacacatgcgtgcagaaggtgtgacgctttcgtatctcgcgccattttcatacggcttctatcgtcggtttggctatgaacaaacttttgatcagacgcactttgagattcaaacggctgacttaccacgattgaaatttgcaccgagtgcaggacaagtagtacggatgacattggcgcaagcggtgccgttgattgatgcgttcttcaatcagcatccggacaatcaagtcggtggtgtgcagcggactgattggtggtggcaatatgatgttatgaagcatagtgattgggaagtggcggtctatcgagaagatacaggacgggtcgcggggtatatgatttatacgcgccaaccagagacgtttgtgattcaagaactgatgacctcgacagttgcaagtcaagaacagctattgagctttattcttaagcatcagtcagcttatgcgataattcagtatgagagtgcactgactgagtcgctagctgatttattgcctgatcccacaatcgtaaagacgacaaccgtcccttatatgatggcacggattgtgtcactagctgatttcttcgcgcgttatgcctatcaagtagcggaactatctgcggtaacgattgcggttcaagatgatttcttacctgaaaatgccggtttatggcagttaagtattcatgcaggacaagctgctgtgacaaaattagcaacggggaccgcagacatcaccgttacgattcaaaatctaactaaggcgatgttggggtatcgcacacttgagagtcaagcacactttgggcatgtgcaagggacaccgcagcaaatcgctcaactcagtgctgcgtttagtcatacgaaaccgatgttatgggattatttctaaattgaacatcaaaaaaagccaatcatccaggtaatatctgaatggttggctttttttaattaagcaggttggacaatctgcacgttggcatttaagacaccggcagaggggatgtcacaatttggcattgcgacgtctaattgttgtgagttagaagcggcgaaggttccggtatcgttgacaacacggtaccatacttcaccggtacttaatgtgatcttgatttgtgagccgcgggggataacgcccaagtgcgcagcgactccggcgtacattccaccgggcatacttgttgcgccaaggaccgcgggatcgtaaaaggttaatttgaatgtccctttgtcaattaaggttggttcggcaggtgctggggccgcaactagttctggctcaggggcgggcgttggttccttaatttctgcggaatcaggatctggatgaatcggacagctaacgggtttgtctgttggtagaacagttgcgtgtttgaccagtgacatttcagctgcttgggcaggttgccccgtgaattgttcaatggcttcagatgacatcagcttttggacagggtggttcgtttctggtgctgcttcattggttaatgcggcacgcgcgatattcgttgtaattagcatcagcaatataaggccgatagctaacaagaatggtttgtttttgataataaagcgtcactcctaggtaagttttggaactaggagagtatatcaatgctgcatgtcaattaaatagcagtttctttacagaaatggggtaatttgtcatgttagtcatatgtttgtaaaatttagggacttaattaaagggcgtcacgatggcgttgatcggcagtaagacgcgaatgggaatgctatcatgacgattactgttaaaatgacaaaaaacagggcaactatcgtaaagatagttgccctgtttttaagaattagatgagaaaatagccgaatacccctaaaatgattaagaataagaagttcatgccagtgaaaacgacaaggaacttaccaaggtctttgccccagcctttcttaaatcgtttgtaagcaatcaagtttgcaagtgaggcaaacattgtgccgaccccaccgatattgatggctaagaacattgcgtggctgtggttagtgaagcttgaaagtaaaatttcagttgggacatttgcaatcaattgacaactgataatcccggtgatgtaagtttgttttgctgttccgacaattgatcgcatgaatgtggcaatcgttgggatgtgacttaaattcccaacagcgatgaagaaacagaagaatgtgagtaataagccgtaatcgactgttttgaataacttaggatcaaacgctagaatcgcgataatcactagaattggtgtcacccataatggaattaatgagaacactgcgaggaaaacgacaaccgttaatggaacgaaataccacagtggccctttttcaacttcaacgggatgtaacccgtgaagtttgatgggttcttttggaaagaggaaggtcgttgctgccaacataatgacgctgacaatcaagacgggaattgaatattcgaagaaatggcgaatcgtcatatggtaaaacgaaacaaggaaaatattatgcgggctcccaaacggtgttaatgaagaaccgaggttagccgaaatcgtgatgagcgtcaccggtaagattggtgaaaattcaagttgacgcgcaattaagatgaataacgggacgaacgttaataccgtcatatcgttggttaagaacatcgcgccgacaaacgttagtgctaataacatctgcatcaaggctcgtttggaacggcttttgataattaattcgcgagcgaagtaatcaagcacgtggagccgttgataaacttgaacgagcgtcataatacaaaagacgctgacgatcacgtggaaattaacgtaactaagttgtgggcggttgaaaaatgaggtgacaatggctgcgatggcagcggctaagagtagtttgtcatctaagaaaaaatctcggatgttcaaagcaatgtttttcatatagattcaattatccttcttaatatagttatattattcaaaaaagcactactacaattctagactgtttacggggataaaaacagaaaaatttacaatatatacacaatttttacaatacatagcctcccattctagtaaacgcggttgactgtctcgcttgacgttagcggtttttaatttgaagaattaagtgattttactgcttatcgcggctaaaattaggtataatataaatgaaatgtaaacgattaatcattattaagaaggtggagcagatgaaagacgccccaagacatacaatcatattaggaatagtggccacggtcattgcgtttatttgtggcatgttagttttaaagacgattttgaatttcaatttatggcttgcgattctaatcagtgcagtactaggcttatatgtcgggtttaatgcattctatagtacgtatttagcagaaatgatcaaaattgaagtggctaaccaaggattaacaagccaagacttagcgacaatgatgcatggtagggctaaggattatccaattgtccgcggtgaattgcgtctaatcatttctcggcgcaaacgcgcacagctgttagcgaagttgcgtgcacgggttagctaaggcttttgcatgaacgattgttctatgttaggataggactaacttattgaagggtgcgattacatgttaattgaacgaccattaattatgaagcttcgctctgtatatttgaagatgacgcatcgtgcagagcctaatattgattaaaagtcatctataggacattactggatttaacgactggtgacagtggtttatttgggtagtgactatggatggagtggtcgatagtcaatgattgtaatcatgacaggggtagcggatgctgcccctgttttttatttggaaagaaagtaggaataaaacaatgagtattttaaaagtcgaaggcctaacacaacagtttttagataaacaactttatgacgacgccgggtttcaagtgaataaaggcgaacatatggggattaccggccaaaacggggtgggtaagagtacgttaatcaatatcctcacgggcgtcattcttccggatgaagggaaagtgacgtggcaaaagaatcttaagattggttatctcgatcagtatgcgaagttagcaccaggattatcgatctttgaatttttgaagacggcttttgcggatttatataagaaagaaaaattaatgagtcaatattatgcggactacgcagagagccttgatgaccaattgctcgaaaaagcgggtgcgattcaagaactattagaggcaaaaagcttctatgatattgatacacgcgttatgcaagtcgccactggcttggggattgatgcattagggatggatcatgatgtatcacaactaagtggggggcaacgttcgaagattattttagcgaaactactattagaagaacccgatatgttattactggatgaaccaacgaactatttggacacgaaccacattgattggctgagtgattatctcaatcatttcgaaggcgcctttatcacaatctcccatgattatgactttttggaacgggtgacaacctgtatcgccgatatcgaattcggtaagattacgaagtataccggcacactacaacaagccttccggcaaaaggaagagaataaggctagttatttaaaggcctatgagaaccaacaaaagaagattgaaaaaacgaaagcttatatccgcaagtataaagcgggctcccgttcgacaattgccaagagtcgtgagaaacaattggcacatatggatattttgacgccaccaagtaatcgcgtgaaggctaacttccgctttccatatcatgcaacggccagtcagattctattgacgactaatgatttggagattggttacgatcgcgcgttactaccagcgttgaacttttcaattggtcgtgatcagaaggtggtcttgaaaggttttaatgggattgggaaatcaacgttgattaaaacgatcattaaagaaattccagcaatcgatggggactttgagattgccagtacggtgaagtttggttactttaaacaagacttgaagtggccgaataatatggtaacgccattacagtatctacaaggcgaataccctgatcagaaacaaaaggaactacgccaagttttatcgcggactggtttaactgccgaagaagcgatgaagcctttgaaacaacttagtggtggcgaacaatcgaaggtgaagattgccgaactactattaacatcaagcaactttcttctattagatgaaccaacgaaccatttagatgatgatacgaagaatgcactacgaaaagcaatccaagccttcgagggtggcgtactccttgttactcatgaagaagacttctatcaaggtgactggattgataagattttgaatgttgaatcactcattaaacaatagggataccgtagagctttgaagggttattggtaacgatgaaacgttgctggtaacttttcaaagcttttttaataaaaagcttgaccgcgcctgttaatcttggtaatatataaaagttgtctcgacgagggacgtatggttgatgactcagcgatacgaaataaaaaagattttaaaaaacgcttgttatttaaatcttatcgtgataatatattatatgttgcttacggagctataacttctaagtaataattaattaaaaatagttgttgacagacgatgttaatgtttaatcgttaaaaaactcgcaaccgaactacgctgcgaatgaaacgcattaatcatcccttcactacggtaccccatggcaatcccaccaatcaacagttcattttccggaatacctattgctttgcggaccgcatctggatacttggccgtttcataggcaggaattgtatcaacttgttcgttagccgcggctaacagaatcgactgactaaaagcccccatgtcataaatcatccatggcgaaactttgcgctcaaccgtcaagtaaataatgacgggcgcattgaacagatggcgttgtaaatcgctaaaattcgctaacccgtcttcgccaagataggcactgatttcatcattccacacgcgactgttctcagccattaacggtccccagtctgtccggtgaatcacgtttaaatcagagtagcctttcatccggtttcccgttcgttctaaatgatcggctaacgtttcacccgtcgctacatagactttccaaggttgtgaattcgtccacgacggtgttcgttgggcggacaccattattttttcgattaattcatccgagatcggtttgtttgggtcaaatgaccgaattgccttgcggtgattaaccacatcgttaaactccatgtgctttcctcctccaactaacacttatttagcgcgttaattacattttaataacgctcataataccagtgtgttggcgtttcacctaatcatttgattggactagaaagtcccaccaccggaaccgccaccaaaaccgcctgatgagccgcctgaaaagccgccagaaccaccactaacacttgttggattagcagcactgaccgcactgccaacactactattgagagctgttgtaaaggattgaccgatgttcaaccccccagtatacccgtagtaataataataacccagaggcattgtttgaagttgttccggcgtcaatcgaatcttcaaagctttaacgaccttatcagcaatcccgaaggccgttgcataacttaaataccgatcccacaatagtacatctgggacattcgccatatcgagtgtcgaaatatcctttagcatttgtttaaagccttgccattcgccccgtttttcgtaacccaattgcgtccatagttgcaaattaaatctacgccagacggttaaaatgaagacaagccccatcggaatgagcgtccaccaagcaactaagccaatcaaagcaccaaaaatcaaaattaaaaatagggcgccaaggccgattaaccaataattcaaactggtcattaactcagcgatgtgttctcgtaaccacccgctacgacttgcttcagtcgccactgctgtttgccacccatggtaatgttgattgaacagttttgcactatgccgttttggatatttctcaatctcaaatagactgacatgctgcccatcaccaatcacatcaaatagccagctaactaacttcttttctgaatgtgataactgattgcgattgacgagcgttaatgaaaattgcggcgtttttttatggaatagttccttctttggttcctgaacatcaattgttagattctttcgagcaactaagtctagaatcgttgcggataagctctccgcccctgctgtctccgtaattggtaatgccaacaactgacgcacaaccgcaggcccattttcatctggcaaatcatagacgtgttctggtgcctgtccagtataagtcatcacaggaagcgtttttcgaattttacgtaaaattaacaagaacatgccgggcgctaagaccactgctcctatagataaaagccaataacggcgtttttgtgctttgcgttcttgattagcttgttgcgccaaacgcgcttcttgtttgataatggctgcccgacgtgattgatcaatccgattcggattcgccgcagtcaccgccgttggaaaaataatatggctttcgacaaattggtttgctggattattagcgagtttaattgtaacccggcctttatcgggttcaacgacttgttgcccatctaaattgccgtgcgtccatgatttaaggtctgcttttttgaatgtggtaggtaattgtattaccacttgaacgttttgtaagtcactatcccacgcatcgccaatcactttccaattcaattccgccgtatcacgataattaataatcagattttgtaactgatatttcaaagtaaccgctaattgattgccatcttgtgcagtttggtatagtttgaaccgataattttgttgtgcatcagttaagctataggtgccttcagtacctgattcactttgactaaacggatgaccattaactgcgacttgcgggttaaccaacttctttggttgaccaacgtttgtttggagattctggttgatatagaccccatggatatcatcttggatatcaaacaccgttttttgttcgacctgagcactcccatcaggttgtacatcaacgtttacctgataacgactgatgtcataggtatcggcagcctggactggctggctaaaaataaaggtccaaaacgccgctattaagataaaaataccaaacttagttcgttttaaattcatagtttgccttcgttctgctcaaccttcgttaataaatcagggtcgaattgccccgctttgagcatcgcaatttcatacgcatatggtgcaaagttatgcttcttatcttcgccaacatatggggtttctagaattttaggcacattaacgagttgttcatgctgtaagacatggtttagcgcatcaaatccgatttcaccaaaaccaatattggcatgacgatctttgtgtgcgccttgtgggttcttagaatcgtttaaatgaacaacttttaagcggtccaaaccgataatgtgatcgaattcattcaaaacgccgtcaaaatcttcacgcacattatatccggcatcatttgtatgacaagtatcaaacgtcactgataacttttcattgtaagtcacgccatcgatcatctgtgcaagttctttaaatgaccgcccgacttcggttcctttacctgccatggtttctaaggcaatttgggcggtttgatcaggtcgtaaaatttcgtttaatcctttgataatttgttgaataccagcatctgcacccgccccaacgtgtgcacctggatgcaagacgatttgagtggcccctaatgcttcagcgcgtaacacttcttcttgtaaaaaagagaccgcaaacttgaagttctcaggcttcactgtattccctaaattaacgatgtatggtgcatgaacaacaattggacctaagttgtgagcttcaatatagggttttgctgcttcaatatttaattcttcgattggtttgcggcgcgtattttgtggcgcgccggtatatatcatgaaggcatttgcaccaaaatcaactgcactctccgctgaccctagtaacatctgcttgcccttcatactaacgtgactccctaataacattccactacctccatgcattttgattacctagattgtcacagaaagcgcaacaaaaagcaagacgaaacctaacccataaaaaaagcccgccattcaattgaatggcgggttatcttatttaatcttaggttcatagaaatgcccgagaattttgacagcttccgtcatgctgacgaatgcgtggtcatccgcttgtttcatgaccatttctaaatcatgcatttcaaagcgagaaataacggtaaataacatcgtcttttcttcacggttatatgccccttctacgtcgtggacaatcgtaatcccacgccgcatttcgtcttgaatcatttgaatcacaactttggacttatcggtaataatcatcacttgcagtttttgttggcgcgtataaaccatatcgatgactttgccgttgacaaaaatactcaagatactatagagcgcatgttcccaaccaaagaggaacccagcggcaaaaacgagcgccacattaaacatgatattgattgaaccgactgaacggccggtttttttgcgcagtacaatcccaatgatatctaagccaccagtggaaatatcgtttttcaaggccatcccggtcccaaaaccgttaattaccgccccaaaaatcgcacagataatcggattagccgttagctgtgtaaagggcataatctgtaccataacacttgaaaaaacaactgcaataaacgtataaatggtgaaatggtggccaattttgaaccacgcaagaataaataatggcacatttaacacgaataacatcaatgacgttgataatggaaatggtagaaacggcataaatttcgacgtcactgtatgaatgaattgcgcgaacccggtaatcccagaggcgtaaatgccaccttcttcccagaaaaagttcaatgcaatcgacacacaaattccgtataaaatggctgccgaaatcttcgccatattttgatgtttccgagctaaatcgtccacttgaatatcacacctatccacttttgatgtctttcattctagcataccatttgtgaatactaaaggatttcttggaattaatgcgcccaattttcacgaatgaaagcacggcgtgtcccctcgaccaattctgctctaaatggttcttttttatagaaatcttggtgatattcttcggctggatagaacggtttggcagcctcaatttgcgtgacaatcggttcgttgaagcgaccactatcgattaatgcttgtttggaagcttccgcgattgcacgttgctcaggcgagttaacgaaaatcaccggccggtaactatcgccacgatcttggaactgccccatggcatcggttggatctgtttggcgccaataaatttcaactaattccgcataagaaataatcgcgggatcaaatgtaatttcaactgcttcagtgtgccccgtcgtatgcgagcaaacttcctcataagttggattaggaacatgcccaccggtataaccagaaacaaccttgataatccccggttgctgatcaaacggatgaaccatgcaccaaaaacacccaccggcaaaaattgctgtatcagttgccattattgtgccccctcttcaaataagcttagatattgaccgtaaccttcattttcgagttgttcgactggaataaattttaaagctgctgagttgatgcaatagcgtaatccaccagcttcttgcggtccatcattaaaaacgtgccctaaatgcgaattagcttcttcactacggacttcaacgcgttccatcccataagattggtcccggcgttccgtcaaaggcgcaattggctttgtaaatgagggccaaccacagcctgcatcatatttatctaacgaactaaataatggttcatgactgacaacatccacgtagatgccttgttcatcaaaatcatcatactcgccggtaaatggggcctccgtcgcattttgttgggttaccgcatattgttctgtcgttaaccgttgttctaaatcatctgtcatatccatcactccttcgtgtttattattataagcagatacaaacagatagcgacaaatatgctcagagtgttctgacagtctgggatttcctgaggattaaagcgaagggacgaataagcgcacagcgcttgtttggcacttcgaattaaccggagggaaatggctgtcagaacacatttagagtgttctagcagtctaggatttcctgaggattaaagtgaattgactgccatcaaataaaaaagatgcctcaaatttacttttgaggcatcttatatgcgttaattttgatttaactgttgttgcactgctttaaagtcagcatagacttcagcaagtggtaccgtaatttcaacaccactagtcatgtctttaacatgtgctgtttgatcagctaattctgattcaccgattgtaatcaccatttgggcgtttaacttattagctgttttaaattgcgcttttggtttacgatcaagatagtctcgatcagcggttaaacctgtatcacgaatcttttcaacgatttggagagttgtcgcacttgtttcagcgccaattccaacgacatacacatcgagtttagattctggaaccaacgcttcgttttgcgcattcatcaataataataatcgttcaacgcctaagccaaaaccaacccctggcatgtccgggccaccaagttgttcaactaacccattataacggccaccggctaagacggttgtgtagccgcgaccaagcaccttattatttgtcataatttcaaaaattgtgtgattgtaataatcgagtccgcgcaccatttcagtatccacttcatatggaatgtgcaatgtttcaagtaagtgcttaaccgtttcaaagtgcgccgttgcttctggtgttaagtaatccaaaataacaggtgcatccttcacaatttcttggtccttagcatctttactatctaagacgcgcaatgggttcttgtgtagacgaactttagaatcgtcacttaattcatcaaaatgtggttcaagatagctgacaagggcttcatgataagccgcgcgactttccgcatcccctaaggtattgatggccagttttaaatccgtaatatggcattcacgtaataaacgcatcgccatgctaatgacttcaatatcgaccgctggactctcagaaccaaatgcttcgaccccaatttgatggaactggcgttgccggcctgattgtggccgttcataacggaacattggtcccatgtaatacaccttataaggtttttgatgttctggcccataaagtttattttctacgaacgcccgtacaactccagctgtgccctctggacgcagcgcgatatgccgatcccctttatccatgaaatcatacatttctttgctgacaatatcagatgtatcgcctgaactccgtgaaaagacatcatagctttcaaataatggtgttctaatttcgttgaattgatagcgggcaaaaacgtcgcgtgccgttttctccactaattgccactggtttgaatctccaggtaaaatatccgcagttccttttggcttttgatagcccatgatcattcctccaaatggataccaaataaaaaaacacccctgtcgttgaacaagggtgcttaaatgcacggtaccaccttaattttagcttaattatataacgttgttgccaacggtgtgcgaccacacagacctcaaaagcagtctcggcgtgccattgatttcttgcagctgtgaaatcatctctgtcgtagggggcttagcctttactttatcactggtcatcacttattcttattgttataagattaacgttatttcaaaaaaaagtcaatcaatcttgaattttttgtaactttttcgctgaaactctttagaaagttgagttttttgctataattaaccttataaattaataaaacataacaaaggtgttgaaaaaaatgcagaaacctttgagctggtttaaacactatccggccgttattatattagcattactcgtttttgtcggtctctttgtgacccacgcgctggctgcttaccaacaaattacgattaaagcgaacgtcgtaaacattcgccaaggccctggattatcttatgatgtcatgagtcaagccaataaaggcgaaacaatgaatgttatctcacaaaagaataattggtaccaagtgcgcttaagtggtgataagattggctgggttgctagctggttagtcgataacaccgaagtcagtgccacttcaaaccgagtcgctaaggtcaccaacagttttgccaatgtccgccaaagcagtagtgccgatagtcaactactcggtaagttaaatcaaggtgacgaaattacagtcttataccaacaaaacggttggagccagattaaatacaactcagcagttggttgggtacaaagtgatttaatcgaagtttccgaccaagctccggcgactgttcaaaaaatgacaaccgctgaatctgagtctacggatactgatacaagtagctccgcgattaaatcagtgacaacccaactggataataccaagctacgcactggtcctgatgtttcgtatcaatatacccaaagctacccggccaataccaagctaacttatatcaataagagtggtacttggtatcaagttaaagatgccgatggtaataccggttacgtcgcaagttgggttgtcactccttctgagaagaatgaagttgttaagactagcgctacttccctttctgaagccaccattgttttagatgctggtcatggtggcaccgacgtcggtgcactttcaactaagtctaagtatgaaaaagactacacattagcgaccgtcgatgcgattgctaaaaaattaaaagcggctggtgctaacgtcgtgctaacgcgttcaaacgatagttttgtcgatctcgaaccgcgacctgctcttgccaataaattaaaggctgatgcctttatcagcgttcattttgattcaagcaatgaagccaatgaagcatccgggacaacaacctactactattcaagcagtaaggatatgagcctcgcgaaggccatcaacaatcagactaagacattaccgcttaacaatcgcggcattgaatacggcaattatcaagtccttcgcgataatcaacggcctgctgttctcttagaacttggctacatcaattctgataaagactttagttatattagcagtgctaattaccaagctaaagtcgctgatgccgtttataccggcttaaccgactatttcaaataactaaaaaagaactgtcagattaaatctgacggttcttttttacataattggggcaaacaaacgcgctaagtcctgtgaccaacgttcttgattgctttgctcttgtatccgttgtttcgtaaatggtaagcagtcttttaaatcagccgtaaaagattgttcaagttcagttgcgagttgtgcatcatataaaaaagcggtcgtttcaaaattcaatctaaaactgcgaatatctaaattagccgtcccaaccgctgctagttgcccatcaactaacattacgcgtgatttaaatccggttgattcagagaagtaaatctgaccgcccgccttcacgatttgtctagcgtaatacaaactcgcatgatgaatcattttatgttttgcacgtttggccatcatgatcttcacagtcaccccagaattaatggctaacactaacgccgccaatacagaatcatccggaataaaatatggggtctgaatccacagccgttttttagcggcagcaatcatcttcaaaaagcctaacttaatctcatcgagttctcgatcaggtccacttgataccagttgcatgctagtctgcccgtgttcatctgagttaggaaaatattgcggactgtaatacaccttttcctgacgcgtagccgcattccagtccatgaaaaagcgagcttgaaacgataacacaccatcgccggtaatccgaatccgcgtatctcgtgcaggaatattaacgtgatgattattctggttaaaatcgccaaggtaggcggtattgccatcaattactgccaattgccggtggttacgaaagttaaagcgtagattaacgaaccggaaccgagaactaaaaaacgggacaacttggccgccggctgcttccaatggcttaaagaactgccgggataaatgttgcgacccaaatgcatcatacatcacacgcacttttaccccccgcagtgccttgtaagccaatagattgaccagttgacgcccgtgttcgttgtcataaaaagcatagtattcaagatggatatgatcttgcgcccgattgacatccgttaacaactgttgatacgccgccttcaaatccgttaaaattgttacattgttttcctgggtcacaaccgcggtatttgatactaagaagaggttgattaagctctgcgtttctggcggtaacgtgtgttgcttctgcgcttggcgtaacgctgctttttgggaggtcaccaaggcatcaatgccgagccgttcttgtgttttcaaatcgaccatatgatcttccggtaatttttttccgaaaaatagatacaaaacaaagccgataattggtaagaaaatcaataccaagagccaggcccaggttgctgcaatatcacgttgttggcgaaatacggtggtaacagccccgattgtatttgcaatccaaatcagtgctatcccccagataatgattgctgtcattcttcattcatcctattctttaaaccactttgcttttaatttggctagcgtaccatttgcttgtaagacccgataacgtcggttgataaattgacgtaattgttgatcttgcggacgcatcccaacagcaaactgttctgctgcaaaaggactgtcgatggcttgaaaatcgctgccattgtggcgtgacttaatttcaaattgcgcgtagacttcatcaattaagagccccttaatccgatcggcctgtaagtcgataaacgcattgttataagtatcatataggattggtgcatggttggcaattctttgctgtaatcgtttaggataacgctctagttgttccatcccagatgagcccgtttgaacgcctaatggttggttggttaaatcagccatttgattaacagggtgtttcttgagcgacacaatcatttgccgattagtcagatacgggtcactaaacgcaacccgttttgcccgttgcgccgttttagaataaccactccaaattaaatcaatcgtttgattattcaattccgtttctttcatatcccaatcaatcgactgaaagtcaacccgaatgccactccccttaaaaatcgcccgtgccaaatcaacatcaaaaccggttaattgaccattcttctcacggtaagtcattggcacaaaactatcatcaatcccgacgactattttttggcgtttttgaatcgttgcccattgatcagcctgctgattgcgttgtgcgcaccctgctaaaccaatcatgctcatcaataaagccgctattaatgctgtttttttaagcttcatcattttgttgaaccccgtttggttgtaattcaaagatttgatcagcaatctggttggcaaattgaatatcatgggtgacaacaatttgtgtcattccctgctgtttcaaatctaaaatgagttgtgcgacacttgccactaacgatggatcaagtgcactggttggttcgtcataacagagaatctccggttgcatcgccaatgcgcgggcaattgcgactcgttgacgttgaccgcctgatagttggaacggataagccgtcgcctgagcacttaaccctagttgctgtaataattctgcgccatctgctttagcctttttagcgggttgttttttgaccatgatgggtgccagcgtcacattctcaaggacagagagatgtgggaataaccgaaaatcttggaagacaacgccaatgcgcgccccttgttcccgattactaggttcgtaaggtttaccatcaataataaaccgtccgctatcgggttgatcaagcccactcattaaccgtaataaagttgatttgccagcaccacttggaccgacaatcgctaaaatactccctgattcaactaataaatttaagtcgttcaaaatttgccgacctttgaaggattgattgatattttctaattgaaacatgttgccgcctccttagcgataataacgataatagcgttccaaacgccgtaatgcccatgtacaaatggctgttaacaataaataaataatcccgactagcaaaagtggtaagagattgacatcacgcgcacttgcgacattgccagcccgcagtaaatccccaatgccgataacatacactaacgatgaatctttaatcaagttgatcacttcgttaccgacagacggtaagacaattttaaccgtttgggacacgataattttagcgattgtttgtgggtaagttaagcctaagacctcagctgcttcgatctgaccattatcaacggcttgaaagccgcctcggaaaatttcggcaaaatatgcagcataattcaaaataaaagcgattaaagcagcatcgaaccggttaaaaacaattccgaccacgggtaaaccataaaatacaaaaattagttgtaataataacggtgtcccacgcatcagccacacatataaatctaaaagataatgcagtggtttaaacttagctaataaccctaaacttaataataaaccaagtggaatcgcgccaataatcgttaggccaaaaacagccaacgtcatctgcgccccacttaataatgctggtaaaatcgataaactatagtcaatcatgacagactcctctcatttgtccaaaataaaaagccctctttgcgtttaaaacacaaagagggctaaatttcgcggtgccacctcaaatttttgtttgcctcacaacaaacaactcagttagttttagaccaataaaaaagtcccctggatttctccaagaggacgaatttatcgcggtgccacctcagtttaataaactgctcacgcagcttaaacttatgtagtttctaaaactacagcgataacgggctaacggatcatctttattcgatgatcaaactcacggttgtgccattaatctcaagggccgacttccaccacgcatcagctctctgaacctcaagaattaatttggaccgttcaacgtttaatgtattgttattcattctattcaatatcgcatcaaaagtcaatggttaatgtttattgcttaccgaaaagacgggcccagaaaccaaccttgtgttgtttcaaagtcatcaatggaactgtttcgcctagtaaacgacgggcaatattccgatagccttggcttgctgggtttttcggatccatcacaattggttcgccggcattggacgtcttgataaccgcatcatcatcaaaaataatgcctaacaatgaaattgaaagatgtttggtaatttcatcaacatccatcgtttcgccttcattcatcatatgacgccgaatccggttaattactaagcgtggcgcaatccgcatttcttcttcttctagcaagccgacaacgcggtcagcatcactaacagaagaaatttcgggagttgcaaccacaattgcaccgtctgcaccggcaatcgcatttttaaagccagattcaatcccagcaggacaatcaagaatcacaaaatcgaattcttcttttaattcattcacgatggcggtgacttcatcaggcgttaacgcttctttatccgcattttgagcggctggcaataagtaaattttttcatcaaaacgtttatctttaatcagtgcttggtgcaacttagcacggccttgggcgacatccacgatatcataaataatgcggttgctcaatcctaagacaacatctaaattacgcagaccaatgtctaaatctaacaagcaaaccttcttatctaaaagcgcaagcgccgtcccaatattggcgcttgatgttgttttaccaacgccgcctttaccggatgtaataaccaaagctgttcccatttttattgctccttcattttacgatataattttggattaatctgtttcaaatccgttaactcaccgtagtcgataacatgtaaatcattgatgaaacttacactctgtgccgtaaatggcgtcttctggtgatcgagaatctcaactgcgtctgctatccgcaattgtaacgcgtgtgataaatcacctgcaacaactgcttctgcattatctggaaaaccagcgtgcacaatcccggcaacttcaccaagtacgaagatactgcccgttgcttttaacattgcgccttggtgtaaattaccgacgaataagacatcgccaacataattgacctcttggccgcttcgtaaaacattgggttcaacgtgaatactattttcccgccgatcaatctcagcctgttcaatcgtcatgacttccgattgaatgcttgtcacattaaattctggaaactgctcaaagacggtcgccagtgcttgcttttgcgcatcattcaacaagcgtctaccagtggtcagctccagttcaatctgattgctccccaactgcggttgctctaagcgaatcttattcaataattccgctagtgcaactaatgcttgatcgaaatccgcacccgcatcaatgtttaattcaaaaccttctttgcgtcctcgtaacgtgactgcatccatagaaaaatcaaaccccttaccgttctgattttaattttagcaataaatattttaaaggcaaatacaaaaagacaaaataaaccaaatttaatgcaattgtcggtgctaaaacattactaataaattcgactggtgttactgttgcataaccaatcaagcgattcatgatgtaaatcgtactctcgagtaatgttaaacacaagacatcgattagcccaatgaaaaaggctgagtcaggtaaatattgttttaaataacgcactgtatagataatgagcggcaccgcaaaagtgtacatcccgatcatccccgtataatacaaatcgtataaaagaccaatccctgctgcataccacgtaagttggcgttcctctggtaaaacaaaggccgttaccactaacacgagcataaatagccggctaatcaacgtatgatctggtgtatataaccattgttcacataaatgactgatggcgccatccaaataaaacgcaacgagtaagtagattggtaataaatagcgccgttgtaatcgcgtcacacccatgctactcaccttcaatcgttcgtttgatgacagtcacaacggttaagttgtttaaatcagcagctggggtcacataaacagttaatgctaacccaaaatcgtctttcttaactgctgctaccttaccaaggtacaagcctttaggggttaatccacctaaaccagacgtgattactttgtcacctttttcgattgccgcatcggtcttaatctgcccgagcttcaattgtttccggtcagcattgtaaccggacatgatcccattaacttgcttaccatctttggtattcaccacagcagcaaatccgttactactttgatccgtacttgaaacgagttcaaccttcgaattagtcttgttgacttcaacaatccgtccaataatcccagactcagacatgacgggcatatcttttttaagtccagctaaggcccctttattgataaccaatgcattttgccaattatcaggattccgggataaaacagacgcattaacggttgtataatccgtcaaggtgccttttaagccgagttcctttttcaaacttgcattttcttctttgagggtttgggtttgaaccttggtttgagctaaatcatcaagttgtgctttaagttctttgttttcctggtacgtattaatcaagtctgttaaggcatctacccctcgaccaatcccattggccggcacgctaatgacttggttagtgatgcccgttacgtcgttgccaaattggcgtacgaaactcggactctttttgttattgcgtaaaccaactgacattgcgatgaagcccatgcagacgattagcatgattaataacacaattaacttcttatttgaaaaaaacttttgcatggtttcttcgccaccatccatccttaatatcgtaaaggtgggacaaaaaccggtgatcagtagtccttcctatagcaatcgattcacaacccgaatctgtcactaatttaggcgctacgtcaacgctgaccgcttcttgtcccacttctactgaacgattaatttttcttcataacatcgatattctttaatgattcgccagttccgactgcaacacagtctaaaggatcttgagcgataaagactggcactttagtagcatctgaaatcacttctggtaagtgtttcaacaatgcgccgccaccagttaagacaatcccgtgatcaatcacgtcggctgcaatttctggtgatgtttcttcaagtgtttctttgatggcttcgataatggctgtgacaacttctttgatggcttcagcaatatcaacagcttgaatgtccactgtcttaggtagcccagttactaaatcgcgaccacgaatgctcatcgcttcaatttccttagcgcgttctggtgatgctgaagcgatttggaatttgatttgttcggctgttctttcaccaatcaacaagttattgttttgacggatgtaagaaatgatcgcgtcatctaacttgtcgccagccattcgaattgaacggcttgaaacaatcccacctaatgagattgtggcaacgtctgttgtcccgccaccgatatcaacgaccatgctaccagttggatccatcacaggaagaccggcaccaattgcagctgcaaatggttcttcaatgacgtatgcatcacgagcgcctgccaccttagttgcatcgattacagcacgtttttcaacttcagtcacaccacttggtacgcagaccattacaaatggcttgctagatgagcgacctaatgatttttcgataaaatatttaagcatggcagcagttgtatcgtaatctgcgatcacgccatctttcattgggcgaattgccacaatactaccaggtgtccggccaatcatgtcgcgggcttctgagccaacagcaatcacgtcaccagtttgtgtatttttagcgacaacagagggttctctcaagacaatgtctttaccgtccatgtatacgagtgtgtttgcggtacctaagtcaataccgatatttctagtccctaatccgaacactatttttctctccttcagttaccaaacgtttttatagtcattggcattatatcataattttacgtaataaaaaacgcaatgtaactactatgttaacggattttcagaaaatttgacaggtctcgcctaaaattaacagattcttaaagaaaaaagcgttctcttttactccactaagtaaccctcttctcgcaaactgagatactgctggcttccaataatcaagtggtctaggcatacaatgcccatcagttcaccacaggcgacaattcgtttagtgaaggcaatatcttgcgttgacggcgtcaactggccgcttggatgattatgcaccaaaataaattttgctgcagaataacggaccgctaatttaaagacttcccgcggatgcgcaactgaactatcgagtgtgccaatataaatctgtttcatctgaataatttgatttttaacgtctaaaaaaacagctagcagttgttcttgcgtttcgcccgctagtgtttcaatcatgcgacggccaaccatttggctcgatgcgaccacaccaaaccggagagttcgttgcgtttgcaatcggtgactcaattcacagatggcttggatttcaatcgctttgactggtccaattcctgccagtgtttccaactgcgttaaacttgcttgttctaaatcccgaaagtcaggataatgcgctagcaatttgcgcgccacctcaccaacagataggtgactattaccagaacgcaaaatgacgattgccaattgctcgttcgataaacttgctgcgccgtactgcattaattgttctcttggttgtaattgtcctgtattccccgccattgtttgcctcccacaaaaaaagacgcatgacgcgtcttcttggtttaactaacaatacgttaattaacgggcttatttttctaaatacggaatcacttgagccaaatccccaacggtcgcaagtgtttgctgattggttatcgcagttggttcaattaaatcagggaccataatcaccggaatggcagctttactagcggccatcacaccattaggtgagtcttctaatactagggcactaggcgctggtaaggctaatctatccaacgcttttaaaaagatttcggggttcggtttgccgtgagtcacttcgtctcccgcaacaatttgactaaaccgtgattgtaggccagtactttgcataaagtcatcgaccatgctgcggaaattgctcgatgcaatcacccgactaatcccctgattatcacagtaatctagtaaatcgactaaccctggcttaattgcaacaccatctgcttcaacaaccgttgctacgttacggtatgaacgatcaataaattctgttgcggccgttgccgaacccagcttcgctttaaaataattgcgtaaatacgtatcagtggtccctaagatggcatggtgatcttcaggtgtaaaatcaaagcccatttctttagcggcccgaatattggcttggtaataaatcttctccgaatcaaccaatagaccgtccatatcaaaaataattcctctagttgtcattgactattctcctttaaaatattggcgaatcgtactaattaaatatagcgaacccgttacgagtaatacatcatcagccgacacatccgctaataattcggttaatgcaaccggccagtccggttcaaatgtaatcgtctcatcaactgctgcatattgggccgctgttgccgcgcgtggattatcaggaaccgtagtcagcaccatccgcgtcgctatttttttgagctgtggtaacatctcatctagatttttatcaccaagcgctccgaataacaggtaaatgtcacgatttttaaattgatgccgcgttgtctgaaccaattgcgccaccccttccggattatgtgcaccatccaagataattaacggctcatcgttgattttttcgaagcgcccaggccagttaacccgttttaaagcacgtttgatgtctcgaacctctagtttttgttgcgtcaactgtaagtaacaccaaaatacttgtaatgcaaccgcggcgttttcaatttgataatcccccatcagcggaatctgtaattgtcgatacgttaccgcgtcattttggaaagttaactgttgcccccaagtaggtaacgttttgaccgcagcactcgaaaaatcacagccactaatggctaacgaactattcaaacgagttgccgtttcctcaaccaccgtcagtgcttcttttggtaattgaccaatcacgactggatgaccagccttaatgatcccggctttttgagtcgcaatttctgcaaatgtcttgcctaatagagcctgatgatcaagaccaatcgacgtaataactgatatcagcggcgtcaacacattagtcgagtcatacaaaccgccaattccgacttccacaacggcgacatcaacctgctgttgtttgaaatatagaaacatcattgctgtgatccattcaaactcggtcacctcaaattcggggtcagttgtttgaatctgggcaaccgttgtctgaatttgttgcgtaacagttactaaatcggcatcactgattggttcctgattgatagcaattcgctcgttgaaccgcataataaacggcgatgtgtaacgaccgacttttaaacctaactcttcaatcaaacaactgaccattttgacaacggatcccttgccattagtgccagtcacatgaatgaattgttggttttcttgcggattaccgagacctgccaacaattgcgtcattcggttcaggttcgcttctttatgtaatctggggcgcgaatgaatatacgccaaagctgtttcgtaatctgtcactaacatcgccaatctcctttaacaaactgtctctattttagcatagattgcacgcgaatcgatgcttaaaaactggcgcacacaaaaagaccacctcagtttttaaggtggccttaacgtgcttttggttgcaacaacttccgcttaatctaaaaattccgttaatcctaaaacctgaattaacggaatttttgtattgatgctcagttgctacccgcaaccaatcacacttctttcactaacgtgctcctcgagcagccttttccggttaactgcaaaatgggcatcatggcaaaaaacgccacaatgcccattttactgttaatcctcaaagcctaaccagctcgagtcgcacttcttttttaacgtgttttcatcaacagcttcctgtgctttgctacacttatcaaatcggcgcttacagcgccaattcgctaagttaggcaaatgctcagaagctaaccgttgatgatgcacttatgcattttttaattctgctactcgtttttcgactgattggtattgttgttcgtagtctgcttgtttgtcgcgttcttcttggaccactttttctggtgcgcggtctgtgaagcccttgtttgacaacttgcctttagcacgtttgatttcaccgtctaaacgtttcaattcgccttctaaacgggcgatttcttcgtctaagtcgagcaattcagccaatggcacataaacttctgcaccactgataatggctgtcttcgccaatgctggtgctgttagaccttcagcaatttcaagtgacttaggatgtacgaagcgttcgatgaagtcttggttttgtttgaagatcctcattaatggcgcatcttgaatgttgaccaagacatcaattggcttgcttagtggtgcattggcttcggaacggatattccggacacttctaattagatcgattaacgcgttcatttgcgttgttgcttctggatcgtctaattcagcgtgcacttctggataagccgcattgacgattgaattgccagtatgtggcatactttgccagatttcttccgtgacaaatggcatcactgggtgtaatagacgcaatgtttggtctaaaacataagccaagttataacgtttattggcaatggctgcttggtcgtctccgtaaaggacttccttcgccatttcaatataccagtcacagaaatcgttccagataaagttatacaatgtccggcccgcttcaccaaattcgaagctttcataaagccgtgtaacatctgccaccgtttggttcaattggcttaagatccatttgtccgttaaatcaaggttagcggcatctggcatcttcgttggcgctggtgtgtcttcaaggttcatgatgacgaaacgacttgcgttccaaatcttattgatgaagttccaggcagcatccatcttcgtgtaactgaaacgaacatcttggcctggtgttgagccactcgttaagaaccaacgcaatgcatcggcaccgtatttttcaatgacttccattgggtcaatcccattaccaagtgatttactcatcttacggccttgttcatcgcggattaaaccgtgaatgaggacgtgttcgaatgggcgttgttctgtaaattcgagactttggaaaatcatccgtgagacccagaagaagatgatatcgtagccagttaccaacgtattggttgggaagtagcgtttgaagtcaggcgcttcagtgtttggccaacccattgttgaaaatggccataaggcactactgaaccatgtgtctaggacatcagaatcttgagtccagttttcgatatcttttggtgcttcttcgccgacatacatttcaccagtttgtttatggtaccaagttgggatttgatgcccccaccataattgacgcgaaataacccaatcatgaacgttttccatccattgtgtgaaggtattttcgaatcgttctggcacaaagttcaccttttgatcggttgcttggttcttcaaagccatttcagcaagtggcttcatcttaacaaaccattgcgttgaaagccgggcttcaacttgtacaccagtccgttcagaatgaccaacactatgtgtcattgggtcgactttaatcaaataaccttgttccttcaagtcagcaacaatcgctttacgtgcttcaaaacgatccatgccgttatacttgccggcactttcattcatgctggcatcttcgttcatgacattgatccgtggtaagtcatgccgattaccgacttcaaaatcgttagggtcgtgtgctggtgtaatcttcaaagcaccagtaccgaaatccttatcgacatagtgatcagcgataatcggaatttcacgattcattaatggtaatgtgaccgtcttgccaacaaggtccgcataccgttcatcatctggatgtacagcgatagcagtatcaccaggtaatgtttcaggacgtgttgtggcaatttcgatgctcccagaaccatccgtcaatggatagttaacatgatagaaggccccttcatcatcttgatgcaacacttcgatatctgataaagccgtccgtgcttttggatcccaattgatgatgtattcgccacgatagattaagcccttgttgtataaggtaacaaagactttacgaacagcgtctgataagccatcgtctaatgtgaaccgttcacgtgaataatcaagtgataagcccatcttagcccattgtgcgtggatggttgcggcatattcatctttccagtcccagacttgttcgatgaatttttcacgacctaagtcataacgtgaaatcccttgttcagctaattttgcttccactttagcttgagttgcaatcccggcatgatccatccctggcaaccagagtacatcatacccttgcatccgtttttgccggattaacatatcttgtaaggtcgtatcccaggcatggcctaaatggagtttacccgtaacatttggcggtggaataacgattgaataaggtttggcatctggattggcatttggcttgaataaatcagcatctaaccaatcttgataacgaccggcttcaacttgatttggatcatatttggttgacatttctttgtgatcagtcatcttgttcactcctttaaaatattgcgtttaatggcaaacaaaaaagcattcctcacaataggacgaatgctttttcgcggtaccacctaaattaggactagactagtccccaactcatgatttgttaacgaacgaaattgtccggttagccctacttaatttcaggttaacagctcacaagctaccgattaattggtcattggaagacgtctcagccatgcatcttctctctaaactagcccaatcttaatcgctcttgttcaacgcgttgttaatagtttagctgagtgaacgccaaaggtcaagcgtcaccggcgttcattctgaaaataaatcccgaatcttctccccaaaaaaatcctgagaacaacatactgttattctcaggatttttatagtttacaatagttcagcaatgatttcttcgtcttgatttaagaattgatcgccagctttgatttctgtcactctaattccagcaattgagcgttcaatcaaggcatccacatcgatgcgttgttcgtagaaccgggtcttatctaagttaggccgggtcttcggtgctggtggtgcaaaaatggtacagcaatcttcgaatggcatgattgataattcgtacgtatcaatatccttcgcaatttcaatgatttcattcttatccattgtcgcaactggccgcacgattggcgttgttgtgacatcattgatagccatcatactttcaagtgtttgtgaggccacttgaccgacagattccccattaaaaatggctaaaccttggcgcttagcacggatttgatccgttaaacgcaacatcatccgccgttgaatggtcattaagtaaccttctggcacagaatgcttcacttcttcttgaatttccgtgaatgggacttcgataaacttaatcccaccaacgtatggcaccaatttcgccgttaattctttggccttattcaaggcattgtcgcttgtgtatggtgggctaaagaaatgcaccatttcaatgtcgacaccccgtttgagcgttaagtaacctgctactggtgaatcaatcccaccagataacatcaacattcctttaccggcagaaccgactggtaagccaccagccccttgaatcacttggttggttaagtaaatcgcatcttggcgaatttcaacccgcaaagtaatgtcaggttttttcatttgcacttctaattcaggtaattcatctgataagtaaccacctaattcgcggttcatatcattcgtatccaagaagaaattgtgatcagaacgacgtgtgttaactttgaaagacatcccaggtttgccgatttctttcatcatggcaagcgccatttctttaacagaatctaaatcacgatcaacttggatacttggtgagaagttttggatgccgaagacgtgacggagacgttcgataacgccttctgcatcgtcgccgtttaaaacgatatgcatccggtcacgtttagggtgaatccggagttgtttatactcgtgaagcgcctttgtgacgttcccgtttaaccgaccgataaaatcgttccggtttttaccctttgtcgaaagttcgccgtagcgaaccataatttcagtgtattgcatgcctatctccttttagatggtagtttacgaattaatttttttgaagcgttcgttaatttgatcgaatgctttgatgaatgcatccgcttcttctagcgtattgtattcatcgagggatacccgaatggcgcttgtcgcaattttttcattgacgtgcattgcctttaaggtactagattcagtccctttcttcgaagagcaagcacttgtcgttgaaatatagatttcgtgttcttcaaacgcatgaaccgttgtttcaccgcgaacacctttaattgcgaagcacaaaatatgcggcgcaaaatcaggcgtcagttgtgaaaacataaccgttttatccgattgactgacatggttaaagagtcgttctcgaatagctgcttggcggtgtactttttcagtctcatcggtcaataacaaacgtaaggctttggccattgccgcgatggctggcacattttcggttccagaacgtaaatcatgctcttggcccccaccggttaaaagcggcgctaaatgacgcccgcgtttcttatacaaaatcccagtcccccgtgggccgtggaatttatgccctgataaggtcacaaaatcaacgcgttcgttgaaaatcgcctcttgaatgcctttgccaatcccttgaacggcatcaacgtggaaatgaatattaggataatccttcaaaatatcagcaatggcttcaagtggctgacacgttccgatttcgttattaatggccatgatcgaaactaaaatggtatcaggccgcaatgctgcttttaagtcagccggatcaattcgaccaaactgatcaacgggtagataagtcacatcaaagcctaatttttccagttgctgcatggatttaatgatggctggatgttcaaccgatgtcgtaattaaatgtttcccaaacgcccgtttttcaattgccgtgccttttaagacccagttatcgccttctgttccaccgctggtaaagaagatttcatcgtggtctacgcctaataaatcagcgatttgttggcgtgattgttctaaaatatgaaaggctttttccccaatcacatgtaaactagaggggttgccgaagaactgttcactaaccgcttgataggtctgaagtgcgcctggcgcgattttagtggtggcactattgtcaaaataaatcatatcgatccttcttactaaaaattagtgttttaacgttgtacattatagcaaattggttattaaagacaaccaattaatctttaacaaaacaaatccgagacaaaatgcgtcttgtctcggactggtgagcatctaagtgactaattagttgcgtctgacttttggtcgtaataggccttttcaacttgtgtgtaagcacctggatcaaccttttcaagggccgttgccaataagtcgacagctttagcatagtcgtattcttcattaaaaatggtttggaccgtcacacaggcttcctggatggcgggaaaatctgcacgatatcggttggcatattgtaacaattgctccgtaatcaatgcactgtcaattaaggtatccgtcttggccttcaattcatctaaatcctcttgaacgagaattaattgcttcgcgatatcgtctaaattaatcttaatttgattcaaatcatgatcaagtttttgaatctcatcagaaacaacgaagaagaaatccaaatatttctgttgtaaaccaggtaaattaaccttttcaacagcgcgcttcaagttacgtagttcaagttcaaactggcgtaagttttcattagcgacgacttcgccttgatgcaaactagcaacctgatcatgaattgcttgttgtttttcttcgatgacagttagccgttcgtcaatcccggtcaaatcttcagcaatcgccgtgtaaaccgcttcgtggttggcaatcttcgcttggtgcccttcaactaacgcctgttcttcaccaatttgcttttgtaattgtttggcgcttgccaactcaccatgtgtgagtgcataactctgattgagatgatcgagttccaataatagctcatggttctgacgttcagcatgttgcacgaatgtcgcggtggttggcaattgcgtcgcgactgccttcttggcagtcatctcagcttctaattgatcatataattgatcaatgccacgtgcaatttcatcgttattggcttcaaccgactcaatggccaaatcacttaacaaggtagtgctcttatcaagttgatccattagttgttgttgtttgacttcaatctgccgatcatcaaattgataatgttcttttaacatttgatggtaggtatcattaatttcaaccagttgttcgggaaactcgttagctaattcgttatagcgctttggaatccgtcccatctggtcttctaattgcgttgtttcagtaattaatttctgcaaaatggccttagcccctagatggtcgccggctgttgttagttcgttggcttcgtcaaaatccacctctaagcgacctagcgttgcttcaagcgcatctaatgcaggtccaaacgaaaaactcttagtcaacaaacgtttacgtagttgttgatattgttctcgtagacgctgaattttttgacgtgtatcggcttcattggcaagtagattttctaaagcatcttgaacatccagtaaatcttgatccgtttcagtcaagtacgcccgcaattgtttgagaatccgtgcaacctgaatgaattggtatttggcattggccgtttccgcatcaaaaagatagccttcaatcgtgctgaagttatggttggtaatctgctcatattgtttttcccaacgatcaaagttttgcaaactttcgcccgtcaaatgtaacgaccgtaacttcgttaagcgttccggaatcggcaacgccattaagtcgcctttatgtgcttctagttgtttaatttgtttgataaaataacgttgataaaaaacaacacttaggtagccaatcagtgcgacgactacgattccaatgagaatgtaaaacattcaaagacacacccttttacaatttaaatcagatttattagtccgttcatccacttcaattcattaaactatgtttgattatagcatgaataagataacggttcagcaataattagcgataaactttagaaaagctgcaattttaatctgaatttgcttgacgttgccgcacaccgtacgctatactagccattgtgtaaaataatgcagcagtaaacggtaaagccgtcaacagttcatttgcccagagttttggttcaattgtgtaaccttgcggctgcaaaggtgaagattgttaataagtgaactgaacgattactaagtttacatcggattattttactccaaaacatttattggaggatttttttatgtcacgttatacaggtccaaagtggaaactttcacgtcgtttaggaatttcactatcaggcacaggtaaagaacttgctcgtcgcccttacgctccaggccaacacggtaacgaccgtcgcggtaagatttcagaatatggtatgcaattgagcgaaaaacaaaaacttcgtttaatgtatggtttaacagaacgccaattccggaacttatttgctcgcgctggtaaaatccgcgaaggcaagcatggtgttaacttgatgatcttgctagaacaacgtttagacaacattgtttatcgtttaggtttagcaagcactcgtgcacaagctcgtcaattagtaaaccatggtcacgtaactgtcgatggcaaacgtgttgatattccttcatacgaagtaaaacctggtcaagaaatttcaatccgtgaaaaatctaagaaccttgtaatcgttaaggatgcaatcgaaggtacagttggtcgcccttcattcgttagctttgatgctgacacaatgaaaggttcacttgttcgtttaccagaacgttcagaattagaaccagaaatcgacgaagccttaatcgttgaattctacaacagataagcagttatctgttcaattaaaagagtcagacttaggtctggctctttttttgcgcatttaaagacgcgtgcctacttagcacacgcgtctgatttaatctatttagtctgtaccaactcatataaaggcaccatcttcatcaaggtcgtttgaatatcggccatgagagcttcgggttggtcgaataatgggttgtctttcagataaacttttccgaggagccactccccttttttggtcttagcaaacttatcttgaatcagtttcaagttctccgatgacattgggaatttttgcttggtcatgtgatcgtagcttaaatcatagtcggcaaagtcccttaagaggctttctgtttggcttgccaataacggtgcgtaatccgtcttatctggcatctcagccattaaagcaaaccaaacgaagatccgatcatcccaaaaaccgacttcaaagtgcggcatcatcttatacccgcgtgagctctcactaagtgccatccaagtattcattggtggatttttgaagcggcgtaaatgcttggcaatatgcaacgagaattcgcgttttgtttctgctacgagttctgcttgcaattgcgcaccaaatacttcaaactttggatcaagttgcgtataaatcttgtctaaccggccctttaaggtttggtcatcaaaaatatcaaaatcagcacgtgtaaacatctttttcctccaacatggtatacttaggtttaattctaatatagcacaattcagaaatgaggcgactattttgtcagataatgatcaattacaacaacacttggatagtgccatgcacggcgcaccacaaaccaatcccgatgaacgccgccgctacctcggctcattacgtgaacgcgtcttcttaggcattactaaccaggaactcgccactgcgcaagctaaattcgaagcgcatcttacggattataagccctattccgtcttattaaacggcaagaaccccgctgctaccgattatttagcggccctttcagcacacgggattccgttcacgctcgttaacaacgaaacagccaaaaccgaaccaacggccttcggtttgttagtggttgccaaagacgcgattaaccatgaggcaattacgctcgatacactataccctgatccaaaaaccgcaacgcaagatgcacccaccaaaaaaggtggtttcttaaaacatcttttcgattaacactaaaaaggcccgcacagtttaacttgtgcgggcctttttgcattactttagtcggtttcaatcgctaattctgggaaaagtaattgtaagacagtcattgaaacgcgccgcgcttgacccatcattgggaacaagtgcatcaacatcgctggattgtagtttgcttctagcacaaccgccatctcagggtgttccggatcatatggttggtataagtttggcacaatgatatcgattcccgtgatactgaggttcaaaatttcagcaacctgttcagcaatcgcaaagtaactttgatccatctcatcggtcacgtcaaccgaatcaccaccatttgagacgttggaattttgtagtaagaagacctgtgaaccacgcaatggcacatcttcagggcggtaaccttgttgtttcaacatgagcaattcccgttcaccgaggcgaatgttttgcaacggtgtcaggtgcgcttcgccgcgtaatgggttgtcatttttcttagcaacaagttgggcgattgttgaacgaccatcccccacgacattggctggaatccgttctaaaacagcctggaccttatgattcatcactaagaaacggtattccgaacccgcaatgaattcttcaactaaaatttgctgatcgtacgtttgtgccagtttaaaagcagcaatgaagtccgcttcacttggacgcgttaaaaatgtgctaatgcccgcccccatgttactgtgttttggtttaatgacaatcgcgcgctgaccaaacgccgcttgataatctgctactgccgtctctaaagcggtatattcggcacccgctggcacccgtataacatgacttgccaataaaattttagtcactaccttattatccactaacggcccactaattagccgatctaaactcgttatattcccatttttgactaattcatgatgatgttgataggtcagctcaataaattgttcatcgcgatccaaaacagccacatgcagccctttttggaaagcgtcaaacatcagcatttgtgttgataattccatatccgtgtatccctgtaactgatagggagtctctgtcagctcacatttaaaacgttttgcctgtttgagggcaaatgcctttagcgagtcctcttcaatcgcttgtgttaagcgataacttaaggtttgtcgatggtcctgaacacgctcattcatcactgtccaagcttgtttaaaacgctcattcagatgataatccgtaatgaattgggccaaatcggccatcacagtcttcaattgtgtttggagctgcgatggccgcagcggattctctaatgctactgtgtcatttaactgacgacccgtctgaatctgagtggctaaatcaccggataatttcggcaaggataataagtacataaagaataagtgtaagaagtctagctgttgttgatcaatccccgtcgcagtatacgggttaatatcaaacccccgaaattctaaataatccacaccagtctctaacatctgatccaatgagtgactccgtaaccgcacagttccgtaaaattcgcgttctgaaattaagtcgccattagcaatcgcttggcgcattgaatcaacatatgcggcaactgaatcaaaatgaattaataattgcttattgctgtagccgaataattcactcgagcgtaaactccgtacagggtgttctggtaatttcgtcatatcttctaaaaagcctggttccgctatcggactcgcaccaaataaatacgttaaaacatagtgataacgcacgtaattttgcgcaatctggatgtacaacgcatcgctaaaatcttttagactcacatagtgatcatgatagtattcatcaaataaacgcacaattaacgtcgatgacaggctaaaattataatggatgccagagaccatctgtagacgtcgaccgtagcgcttcgtcaaatagtcacgataggcctttaccgccggtgtgtattctgaaattggaatggttaattcatcgtctggtaacaacggtggcatactgaggggccaaatatattccgaatcggccatacttgattgcaatacttgttcgagcgctaataattgttgttggacatctacggtctgttcgaaggtatccgtaaccagttccgtttgcatctctgcaaaatcagtcgcaatgtatggatgaaacgttcgcgatcctaactcactggggtgcggttgttgactcaatgcgcccaatccggtcactcgctgcccctctttttcgaccccaaaagcaccttggttcaataaaggtgttaagcgtaattgtttaatgttctcaaataattgattaggcattttgaaacctcttcttaattcagtcttatacaactcattatacacatccctaaaaccttttaaaacgataatcactacgaatttgcgcgacatgttatactaggaacaacctaaacattaaaggatgaacgctatgcaacaacctctcgcatttcgcatgcgtccgactaacatcgatgaagttgtcggtcagacgcacttagtggggccgcaaaaaatcattcgccgaatggttgatgccaaactcctctcatcaatgattctctacggaccgcctggtactggtaaaacgagtatcgctagtgccatcgccggtagtacccagtacgcttttcgcatgctgaatgctgccactgatagtaaaaaagatttacagattgtcgctgaagaagccaaaatgagtggcaccgtgattttactcctcgatgaaattcaccgcttggataaaaccaaacaggattttctcttaccacatctagaaagtggccgcattatcttaattggtgcaactaccgaaaatccatatatcagtatcaaccctgccattcggagtcgggcccaaatttttgaagtcaagcccctcactgaagccgacattcatgtcgccattcaacgggcactgacagataaagaaaaaggcttaggtgcactagccatcaatctcgatgaaacggctgaacaataccttgcccgcgtcacaaacggtgatttacggagtgctttaaacgccctcgaactcgctgctcgttcaacaccagcgaatccagacaccaacgtcatcgacatcgatattgacgttattgaagaatgcgtgcagaaaaaagccattactcatgataaagatggcgatgcccattacgatgtcatctccgcctttcaaaaatcagtccgtggcagtgacgttgatgctgcgctccattatatgggccgtttgattgaagccggtgatttaatgtcgattagtcggcgcttgatgacaatggcctacgaagatatcggcctcgccaaccctcaagcctgtgcccgtacagtcgaggcaattgctgcggctaaacaacttggttttcccgaagcccggattccactggccgtagcagtgattgatctctgcttatctccaaaatcaaattcggccatcaccgcaattgataacgcgttagctgatattcgcgctggaaaagccggtgaagtccccgatcatctccgtgatgcccattatgcaggggctgaaaaacttggccacggtgtcgactacaaatatcctcataattatcccaacgactgggtcgcgcaagattacctaccagataagctcttaggtagtcattattacgaagcaaaagcaactggtaaatacgagcaagtcctcaaacaacagctagaacgcttgcgccaagccagtccgcataagtgaacggttacaaaagtgttgtgttaacatcacgagcgtgctactataatagtaggatttctaaggtgtgcgcgtcttcccaccttatgttgaccgatcaagtaattcgttaatgggacggatgagttattagcgagtgtagactttttcgcgaaggaaccaagtctaataataatctgacccacctgcattttctagcgggctcaactatcgggaagcatctacggcaccactagatttcccaaagtccaacgactttgaccgggctaacgtttacgttggcccttttttgttgattattttaggaggttgcacattgattcaaatcgccataatcgtttttttaatcattatcgccctacttggtgcgattttatgttactaccaagacaagaagttcctactctttgatttaactgaaaaccggtatttaggtcgattgatgtacttttcagggattgcgctcatcggtgtagcaatctgcggggctttgatttactggctattgccactagtctggacattggtgacgctcgttgctgccagtttaatcgccggcttagtcggccttagctttgcaactaacctttaagatttacttttgacactgaactagcgtacaataaagatgtaaaattaaatgaggtgatgacaatgttacaacaatacaagcacattttggtcgcaatcgatggttcttatgaagctgaactcgctttccgtaaagcagttgaagttgcccttcggaataacggacaactccacttgattcacgttatcgatacccgcgccttccaaaatatctctagttttgattccgcaatggttgaacaagtcacagaaacagctaagaaaacaatggacgaatacatcgtgactgccaatgaacttggcttaaaagatgttgactatagcattgaatatggcgcaccaaagagtttaattgcccgcgaagtacccgaaaagaaaaatatcgatctcatcatgattggtgcaactggtttaaacgctgttgaacgtctcttgattggttctgtaacggaatacgttactcggaccgccgtttgcgacgtgctcgttgtgcggacagatttagataataaacacgcactcaacaagaaacgcagtagcattggtcacgaagaagcataaattagcaatcaaaaagccgggacgcttatgtcccggctttttttagtggttaaccacttattcagccaattgttgatcaacttgcacaatgatctctggatgatgccggattaacgccaatgttttagcaaccgttaaatcctgtaaggcgttctctcgatgaagcgcatgttctgcacgaccaagaatgaaatacaatgcatcaagtaagtaaagactttgcttatcgattgcttcgtcaatcgcaagctgagcgtacttaatcgcaccttcataatccttcaattcaaaaagaattcccgctaagtgattataaatctgcaactcaacttggaaatcggccatagcaagtggatcagaattctccaacatttcaacggcttgttctgcataaatccgtacacgctctaaagcgcccttcatcaaataggacttgctaatgccgataatacatagaataccgtaaacatccgtctgagaaacaacgtattgattgaaggcacgattgaaaaagaaaagtgcatcgtccggtttattctccagcaataacttaatttgaccttggaaataataataccgtttgtaatcatctgctttgaccagtcgatctgtgtagatctgctgaatcaaatcacgtgcttttttgaattcattggtaaataacaatgcttgcacacgactcaacaagacgtgtaattgatcatcttcttgcacaatcactgagtccaacgtaatttcaagccgcttacaaatttccaagagaatctttgtgcttggcacctgttcttttttctcaattaagctaattgttgcttgcgtacaaattcccttagctaactccgcttgagacatcccccgtgctttacggatttgttttagtttatcccctaatattctcattttaaatactccaattacatcattatttaatttaaaattaatttccggaaaatataacccaattaagtaatttacatcaattagcaatgacgctactagttgcgtttattatacactatgaactagttatgtggcattacttatttttttatccaataagtattttacactacatactaaacattaccaaacatttatctttaattaattgttaaggtgctgttcgatagtacgacaaaaaaacggcttcctgcagcggaagccgttttttataacgttgctaatattgccggaacttcttttaatgattcaatttgataatccgctgccgattgatcaatcgcgaaaagtggatcaaatggttttaatgcgatgacggttaaaccagccgccttccccgcttgaatccccagtgcagagtcttcaatcgcaaccgcctcggttggttctaaatgcattcttttaagcgcttctagatacacatctggtgctggtttattatgcgcaatctctgcaccactaacaaccgtttcaaaataaggttctaacgcggtttccaacaacatttgttgaataattccgcgctcaccagcggacgccaaaccgatttgatatgtcggtgcaacggttgctaataacggttgcgcgtctgggttcatgatatttttaaaaacgattggatgagccgctttatacgacgtatagccgtttttaattgccgctcgttccaaaacagtatggtttggaaacaactgttttaaaacggcattcatattggaaccaatttgtttacgactttcctctgccgttagtcgtgcgccaattgcattcaaaaatgctaagcgttgttcaaaatagtacggttcactatccactaaaacgccatcgacgtcaaaaataatcccttttactgtcatcttctctcaatcctatctggttaattaaaataaatctgaaatcttccgtaagtaatccgcaattttatcaggtaattcaggttgtagcaacaatgactgtaaaaagcgattgcggttataccaccgattccaaaaaccaacggtatcctgtggtgccatagtcaacaatgaacgctgccactcctgtaagacgattaaacaataatcgacatagagttgatgcttgttcattaaactgattagaacgttcgtcagatgactatcttcaccatatgcgagtgcgttatcagagaagcgatacgcctgtagtacaattgccatcatcaaaatcttatccgcacgttggatttcaggtgtttcgttaagttctgaccagacattgatgatatgcgtcatcgcatgcgcccagcctttaccatcaacgtatcctcgtgaatctaattcgatgactgtataagccattactcgccgttcaattgccaataattcggccgtacttaatacatgataaaaagtgcggttagcatataaaatcccggccaaaaacatcgcgctaaacgaacgtaaaaaaacagcgtcattttcaggttctaaaatatgcgcgaataaataatcatcttgcaataagcggtccttgacccaaatcaattgggctggggttaaaaccgtctgccgtaataatcgattgaataagtaaaaaacacctttatcgcgcacttgcgaatctgggcttgcaagatgccttaataaatcatcgagctcttcatcgctgatggtcgcttctttgcctttggttttaattcgctcatcaattgctgtgattcgttgcaagactgactcgttgtcctcaggtactacgacatgtgtccgccgcgtcttatattggacgccatccatgacgaccaatactttttccggaattgattgatagatgtcccctttaatcaatgcactacgaatcgcgtctaactgttgcatcacattttgaacttccttcatcaatcatcacccactctctactgaaaacatctcataactaactattataatgcattcggccacagacataaactatcaatccttaaacaggcccacgatatgacaaaatcatcacctcgcttagaataaattccacctttagactgaatcaatgtaacttctagcttgatacgattaagacatcaattcacaaggagtgtcaatcatgaaaaaaatcattctattactgttctcacttggactaattgttatcggcggtccaattatcggatcagccacaactcagaatatgacggacggcaatgaccttgcccaacagtgggaccggttcaacctcttaatttccagagaagccgtctatgttaaaacagcacaccaatacgggacacaacaagcacatggcgattacctttaccggcaacctgcttaccgtgctgatggcagtcattacgaagtcgttttccaagcgccgcgcgcactaaaacctaatcactacttaaaattagatgccaaggggtgcttcgtcaattcttggactgccgtttcaaaatctgaattgcccgttaaactgcagtctagtctataattgtaaaatacaatcgaactaaatgctgttaattgcgaaatacaaacgagggatttcgcttttttcattgcttacatttaataagtatgctatattattcgcatgcactgataaaaacgatttcacaagggagtaatgaacatgacagaattattcgatttacaacaaacacgccggacaatttatgcacttggcaaaaacgtttcaatgagcgaagctgaattatcagaattaatcttcaacaccattaaagaaacaccaactgcttttaacgcccaaggttcacgcgccattattctctttggaaaagcaaatgaaacactttggaacgatattacagcaactgccttaaaaccattaacacctgcggaaaacttcccaagtacacaagctaaattggcttcattcgccgctggtgtcgggacaatcttgttctttgaagatcaagacgttgttaagaatcttcaagaaaacgtgccattatatgccgaaaacttcccaacatggtcagaacaagcttcaggcatggcacaatatgccacttggttagccctcgcagaaaaaaatgtgggcgctagcttgcaacattataacccagtaattgatgaagccgttactgcaaaatggaacattccatcaaactggaaacttcgtgcgcaaatgccatttggttcaatcgaaaatccagccgatgctaaagactacaataccgatgcaagtcgtttccaaacctacacaaactaattttaaaccgaatcgaccagagtgcgcatgcactctggttttttattttacccaacaaaaaaagcgactcgcatccgcgaaccgctttttactttaaggagaatgagagattcgaactctcgcgtgggcagaacccacctgacggttttcaagaccgttcccttcagccagacttgggtaattctccatatcaaatcttacaacgtttattataatatcaagttcgctaatcactgtcaagcctgttttttaaaaataactactatttacacccgtccaccaactcggtatcataaaggggtgcatttaaaatcaagtaaaactacttggactggttcggaaacttcccagaataaaaaactaaggatctcaaggaggttagaaataaatgcaaactcgcaaaatcattatcgattgcgatccaggcatcgatgacacgctcgctttgaatttggccattcaatcgccagcggtggaagtcgttgcaatcaccattgtttgcggcaacgttcccgtccaaatcggcgtggacaatgcctttaagtgtcttgaacgtctcgggcggctcgacattcccgtttatgttggtgcggataaaccgctccataaaccatttgtcagtgcgcaggatacgcatggcatggatggtttaggtgacagccatatcccgcgcctatccactattcaaccggcacaacaatccgccgctgattttttagcagccacttttagtcaaccgagcgatatcagtattatcgcactcggaccattgaccaatattgcgactgcgctccagcggaatccagatttaggtcggcactgtgcccgctttgtttcaatgggtgggacctataagagtcacggtaactgctcacccgttgctgaattcaactactggagcgatccggatgccgcactgttggtattcgaccaactcgatcaaaagattgaaatggttggcttagacgtgacccgcgaaattgtcttcacgccaacattgctggcttattgtcagcgtgtcaatcctgaagtcggcgactatctaaaagccatcacccagttttattttgattttcattggcaatatgaacacattatcggctgtgtgatcaatgatccattagcagtcgcctattttatcgatccaaccctttgtcacggctttgaaagttataccaccgtcgaaacaaccggcatcagcattggccaaacactggttgaccggttcgatttctggcaccgtcctgccaatagcctcatcttaactaaggtggacaccaatcgtttctttgaacagtttttgaccgtcgttttaaatgcacaagcaaccctcattaaaacggacttaccaaaacttagataaggaacctattatgcgaaaatttaaaacacaacacttaaccattctggcacttgccattgcactcaattacgtaggcgctaacattgccctatttttacggttaccaatctatctcgatagcgtcggcaccattttagccagcaccctattaggtcctctggcaggcgcattaactgccacttgcagtagcatcatcagcggtgtcacgaccgacttatttgcgctttattacttgccagacggtctattaaccggcttactcgctggatggttcttataccaccaccaacggacgaaacgcgagttaccccttgttgctttaggtgtcgccattcccggcacaattgtcagttcattaattacttacttcttgttccacggtatcacctcttcagggtcaagtttaattgtacaactactaagcggcttgggactaaatcagtttgtcagcattacactagttcaagccggtacggattatctggaccggctcttggcaatcattgtggtgacacaggtttgcgtccacctcaaacaaaaaatcaagacactctaatcaattaaaaaaaagcaagtgtgcttctaacatcaattagaaacgcatttgctttttttagttttgcatcagtaacgtgacatactgttctagataatctcggtcgacctcatcgtaagcgccaacgacgcggttatcaagatccaaaacaccgattagttgattagccttgatcattggcacaacaatctcagaacgtgcagccgaatcacaagcgatataattctgatgttgcgccgtgtcttctacaattaacgttgtttgctttgcggcggcttcaccacacacccctttacctagtgcaatgtgcatacacgagacgtttccttgaaatgggcctaaaatcagctcagcatcttgatacagataataacccgcaaaaacagtctccggtaatatttgatttaataacgccgaagaatttgctagattagcaattaaattcgtttcacctgccagcaaagcagcttgttgttttaagagcatttcgtaagcctcgactttagcttcttttgatttaaacatcacaatcacttcctcttttcaagctattatagtggaagcttgctgcgttagcaattcaaaacatcccttaatttcgacattaaaaaaaccgcacatcggcgatttttttaatgaaaaattgttttatttcttcgataaactgtctctggttcgccctcttcatgattgacgtaccgcgcaatcgcgtataaataatcagagagccgattcaagaaagttaatacagcttcgttaatcggttctacttcctgcaaggcgacgacttggcattcaacacgccgcgcaattgtccgacaatattgtagtttcgctgctgatggtactcccccaggtaaaataaattcttttaaagcaggtggaacatctgcatactgatcaatcttagcttctaaccatttcgtgtatgcgttgtctgtccgatacccccgcgaatcatccggcgtcgctaaatctgtcccacagtcaaacagaatttgttgaatctcaaccaattccattctcaatgccggataatcaggtaaatcactgatgacgacacctaagtatgaatttaactcatcaacacccccgtatgcttccacacgaattgcgtttttgcgcactttttgaccgccgataattctggttaatcccttgtcaccggtctttgtatatagtttcaatccgtagcctcctaaaactgtcatccactatcaattttagtgtaccacgtttgaaagcgaatttttggcgttgcttaatttttaacacttgtctgcttgtatcaatttaagtaatgcctcaattcgacggtacgaaacatcacatgtatcgccatttgcaaatatcacttgatgcgtctccttatcaatccgtacgactttgtccggattcactaggatactcttatgggctctgaaaaattgtggcaattgcgcttgaatcgtcacgattttccctacaaattcacttaaccgatgatcactgtgtaagaagacgtgccgtgctttatgcgctgtttcgaaataattaatctcttgaattgccactttttcaaacgataatccatcatcatattcaaaataagctggttcttcagctaacggcacctgttgttgtcgtaacttaatggcatcgttaatggttgcttgaatatctgcgcgaacctgcgccaacccgcgatccttcaaaataaaattcaaaacattaattcggcgttgaatggtttccattaaaagttcgtcatgcgttgaaacgaacgcaatctgtgcatatggatccaattcacgaattttaagcgccaattccatcccatccagcacgtcattctctaaatcaatatcaagaaagtaaacgcccccttgcgtttgactttcttgtaaaaaaattaataggtcatagccattcttagtcttcaaacgcacctgagcatccaatgtattttgttgaatatatgccgttataatctcttcataactatctagtaaaacctgtttatcatcacataaaaaaatatcaaccatgggtctcctcctgttcaacaacaagcattgcaacgaaatagtctccatcttgttttaacattaagctaaaatctgagcgcatatccgtgatttctttagcagttgtgagcccaagcccgcgattaatccccttcgttgaataaccagcctgataaagctgaccaaattctactggtgtattaatcatatttttgacacaatagaccatcttacccttttgctcgaataaactgacactgattgaaccatctttaatatcatttaccgcgtcaattgcattatccaaaaagattcccagaatccgtaattcatcaaaatactgttgttgttgcttaaataaatccggttgaacctctaaattaaagggaatccgattattatgtgcttcaatatacttgctaaaaataatgcctttaatataagcattattaatctcttgaaaccgtccaattgcctgatcttgaatcgtgtcaaagctataatgcgttagtaaatcatgaaaatcctgcattaaaactgggctcccttgttcattgataattgtctctaaagccaataaagcattggcgatatcgtggcgaaacttgcgtatttcacggtagttacgctctaactgttcaacatacagcgttagatttcgctgactttcttgttctacgttgattctattttggcgaatcacagctttcgtatacaaaagcattcccacaatcaccaaaactaatagtaatagcacaagtcctaacacaaggtacaaatattcaaccggcagattcgcatgcttaaagctatcaaaaagcaccatcactgccaccacaaataacgcgagaccggctaaaatcgtgccggccacgcacataccgtatgaagcaatggatgctttaataagctgatctaaccgttggacaattaatcctaatccggctgcaatcaataattgactcaacataattaaacacaccatttgccaattaaactggctactcatcagattatcaaggccctttaagtgagtatacccaattaaccccaccgttgttagaaccgatgatagcatcacgatgatgtaactaaagatggttgcgataattaacgcataacttgtctttaatttacgcagatttttaaagccatttaaccaaccatataatccaacagttgccaaaatcagccatagctcttcaagaaaatttccaattaataaatccattccctgaacaaaagcaatgccgactccaactgataatagtagttgaaatctgttcgttcgtttcaacttccccgtcaaaaataatactaatagtagaaacgaactaaacgtacttagattaatgacaatctgcattgccagcggcattttcattgccatgcataaaactccctactcgaaccttaattccaaaaccagaaaattaaattttgaatgttactcatcattatcatacccctcctttcatattatgaatacccatgattggtgactcatttcgattttatcacgtaatttttttaaaaggattaaatgtcataaacgtatacttgtctgcattaaacgtatataattaatcataaatatagataaataattactatttggaggctaaaaatgtttttaggccaattgatccatcaacagcgactcaacaagcaactgacacagtctgaattagcagcggggatttgcacgcaaaatacaatcagcaaaattgaaaagaaaaatctgccccccacaatcccaattctaattaagatttgtacacggcttggattgacattaaatgaacttttcaccgaatttaacgcgctcgacactgccagtgacgaaggcgtgatttctgcggaagttgctttattagcaggcgattctggccctgctgccgcattaattaccgatatcgacttcaaggcaaccgaacatccttatcccgccatcttcttctttttcaatggctatttaagttaccttgaccatcaatctgaattacagattttttccgcttataactcgttcacagcggccatcggtgacgacacttcaacgttgaagttacttctaaataccggtatgggtttaatttaccaagaagctggcgaggaattagctgatttttatttcaataataatatcaatttcatcaaccaacttgatcacatcaatgtcattgatgttcaacgcgtcctatttgcttcgcgtcacacagcagcctatatgattaaccaacaccgcattgatgcagctatcgagtttttgacgaaagccctcaaactgagtcaaaaaaatcaaatcatcaaacaagtcgatcatttgtattacctccgtgctcgggcgcgccaacaaagcggtcgagactatgcagaagatcgcgaaaccgcgttagtttttgccaaataccttaaaaataacgcgttaatcgctaaaattaaagcgttactggatacaaaaatattaataaaaaatgcggaagtagttcagtggtagaacatcaccttgccatggtgggggtcgcgggttcgaatcccgtcttccgctttttttgtacccgtaataaaatagtttccgggaagtagctcagcttggtagagcactacgttcgggacgtaggggtcgcaagttcaaatcttgttttcccgactctcaaagacttgttgatgacaagtctttttttgtgcgtccaattgattagctactaaaagtcagtaaactttcattttgtactgataatcgttataataatagtcaacgttagtcaaagttaaacttttgacactgaaaaacgcagaagactaaatgaaggggctgatatgtttgcaaagtcagaacatctcggatattattgaagcctatctaaaaaagatactggctgacaatgaacaaatcgaaattagacgctccgaaattgctaagctttttaattgtgtgccgtcccaaattaactatgtgattaatacgcggttcactgagcagcgcggttatgtcgtgaatagtaagcgtggcggcggtggttatattcggatcgtcaaggttcaatttctcgatgatcgggactttttagaagcgttaattgaaaatgttgatacgcagatttcccaggcggacaccttagccattatccagaaactatatgatgaacaaattctttcgcaaaaggaaggcaatttgatactcgcggcaacgagtccacagacattagcggttaataataaacaattagaagagcagcttcgagcacagattctagttgcagtgttagaacgactacgatatgaaattaagtaaagagtgggggattatccatgaataatctatttacaccaagtgcaaaaaacgtcttaatgatggcacaagaacaagcaaagaaatttaatcaccatgcactaggaacggaacatctcctattagcaatcgtattagaaaatgagggaattgctgggactaccttacgcgaattaggtgtcaattcgaccgatgtccttgaagaaattgaacgcttaaccggatatggcgatgctgtaatcgcttctggcattggcggttatttaccatattcgcccaaagccaaacaagtactcgatattgctcgggttgaagcgcaacaagctaattcggttaaaattggcacagcacacctattattagcacttttacgtgatgatgatattatcgctgcgcggatcttattgaacttaggacttagtttagctaaaacacgccaactactacttcaaaagatgggtgtggatacggcaaccgctaaaaaacgggctaaagcagctaagaataatgccgatcaagctgggacaccaacgttgaaccaattagcgcgcgatttaacacaacttgctcgtgacaatcaaattgatccggtcgtgggtcgtgatgaagaagttcggcgacttgtgcagattttagcccggcgttcgaagaataatcccgtcttagttggtgaacctggtgtcggtaagacagcgattgctgaaggttttgcgcaacgcatcgtcaatggcgatgtgccaagtgacatgcagcaaaagcggctcatgatgctcgacatggggtcattggttgctgggacaaagtatcgtggtgaattcgaagatcgtttgaagaagattatcgatgaaatctatgcagatgggcaagtgattctctttattgatgaattacacaccctcattggtgcaggtggcgctgaaggggcaattgatgcttctaatctcttgaaaccagcattagcgcgtggtgaattacaattaattggtgcgacgactttagatgaatatcaaaagtacattgaaaaagatgcagctttagagcggcgattcgcgaccgtcacggtcaatgaaccaacgccagaagatgcggaacaaattttaaagggattacgtccacgttatgaagctcatcatgggattgcaatttcagatgaagctttacatgaagcggttgtcttatcaaatcgctacatcacgaaccgattcttaccggataaggcaatcgatttaatggatgaagcgacggctaaggtgcgcttggatgctgttaaccagaagacaccgtcggataaattagaacaaaaactacaaactttaaatgacgataaagaagccgctgttcgcgcgcaagattttgaaaaagcggcgacgattcatgagcaagaagtaaccactaaggccaagattgccaagttacaagctgccgaacaagaaaacggtgttcgcagtgacattcaagtgactgctgaagacatcgctcaagtggttgcgcaatggaccggtgtgcctgttactcagttgcaacgcaaagaaagcgaacgtctcatgcaacttgaaaaagtcttgcataaacgggttgttggccaagaagaagccatttctgccgtttcacgtgcgattcgtcgtgcgcgcagtggtttgaaagatccaaaacgaccaattggttcatttatgttcttaggcccaaccggggttgggaaaacagagttagccaaagcattggcggaagccatgtttggttctgaagacaacttgattcgggttgatatgtctgaatatatggaacgttacagcacgagccgtttagttggggcggcccctggctatgtcggctacgaagaaggcggccaattaacagaaaaggtccgcaataaaccatattccgtcattttatttgatgaagttgaaaaggcccaccctgatatcttcaatatcttgttgcaagtcttggatgacggctatttaaccgattcaaaaggacgtaaggttgatttccgtaatacgatcatgattatgacatcaaacttaggtgcgacagccttacgtgatgataaatccgttgggttcggggttaaagatgtaactgctgattataaagcaatgcaagggcgcattatggaagaattgaagaaagctttccgtccagaattcttaaaccgaattgacgaaacggttgtcttccattccttaacacaacctgaattgcgcgaaatcgtgaagattatggcgaagaatgtcttgggccgtttagcggaacaagggattcaaatcaagatgacagctgcagcgatggatgttgttgccaaagctgggttcgatcctgaatatggggcacgaccaattcgacgggcgctacaaacccaagtagaagatcagttgagtgaagcgttgcttgctggcgagattacgatgggtgtaccggtgacaattggcgcaactaaaggtaaaattaccattaccagtaagactgataaagtaactgtttaaacgtaaataaggtgtcagaccaattggtctgacaccttatttttttgccctaaaagggtcgtgagctgttcaatttcagttttaatcgcagcgccgatattcgtttgactgacacgttgacgttgactaacttgatcaatcactcgacgcgtggaaataatgtcttgcatcttggcaattgcattggctcgtgtggtgaacggctgatgggtgactaactgcattccatacgaattgtacaggagcgtaaagccaccaatgccagttgtgtggtgataagcttttgaaaagccgccatcaatcacgatcattttgcgattagccatgattggattgtggccttttttgacaggtgtgtgaccattgagaatgtgccccgtttctggcgttaagccaaactccaacaagagtttctcaatgaagtcttcctgatggcggagttggtaatatgcgttcttcttttcttcgtgtaaaacggggtcggcgctgaagtagcgttcgaaggtcgtcatcgcgttcttgccaaatagtggggagagcggtcctgtccacaggtaccagagtaaatcggtggataaattatcttgattgagcgggtggtcgaagctcattcgaatttggtgatcgaagaagtcgagtaatgatttaccagcgtattgtcggttagcgagggttaacgtgaggaagttgccggcttcatcaactggaatacagccgtgaaaaaggagattctggttgtagagttggtacatgttaccgttgtcgattaaaaaacggagatgcttgcgtagtttttggcagtgggtaaacgtgtttagcaatgatgtaacaatggctgcttcatcggaagttaatatttcggggtgtgtggggtcgattgtttgaaagcaggtgttatcaagtgggtagtcatgaccatttagatgaattgtctgctgttcaaagtcaacatggctgaggattaagcggtggtccattttgaaatcaggattgcgtttaatcacggtttgttccaacttaaactgcatgatggcgatggcttggtgcacttggttgatgcttttcttttcagctgttgagattgcgggttgattggcagcaacctttggttcgaaggcgggattgggctgataagttcgttgggcaaactgaaccagttcgctaaggtcaattccgtaagctttctcgatgatggctaaattattgtagcgtgcgcaaatgcgtaaaaggttgagcatacatagttgagaaccgctagcggcgccgaaccagagaatatcatgattgccccactgaatatcaaccgcagggagcttggtgagttgttcgacaatcagatcgggacgcggcccacgatcgtaaatgtcaccgatgatatgccaatgatcaaccactagtcgttgaatcgtatgactggtggcgataattagggcatcggcttggcccatcgaaatgatggacgtcgtgatttcttggaagtagcgtttcttatcactgttagctacatcgccgtacattaattcttcggtaatgtagacgaaatcgggcgccattgctttacggacttttgagcgtgtgtattttgtggagacaaattttaagaggtcgattaaccgtttaaaagtggtgaggtaccactggtcgagttcactagcagatagttgtgcgtgtttgagtgcaagccgctcagttgggtagtaaactaaaaaagcgaacgcctgcattgtatcttcagtcatttcaccggaaaagacctctgtaattttttgccggagattccctgcgccagtgcgaatgagatgctggaaggcatcatattcgccatgtaaatcactcatgaaggcttcagtgggtttgggaaggttcaagatggcctttaagttgatgatttcggaagtaattgccattttagtggggtatttttcggataacgttttcattttgttgttaatcattcgccgagctcctttgataaactaatagttcgattataccaatcgtaaatataaatgcaaattactttgtttaaaaacattttattagtatataccaattaaaaaagtcgcgcagtttagcgcgacttctggaaactattgatcttggatggtgccatcaacgtggcgttcaactttcatttgcgtcattgggatgtagcccagtttagggacgattgtcttttgaacgtcttttgattggatgaagtggatgaaacgggctgtttgatagttaggtgcgcccttagtatacatatgttcgtaagaccagattggccatgcattggttgaaacgttcttttcggtaggttcaacgtcgtttaacttaacagcttgcaagttacctttgatgtatgggaaggcgaggtaactgatagcgcctggcgtttgttcgacgattttttgaacagtcccagaggaatcttgttcttggctggtaacaactttgtcggttttaagacctaatttttcaaacgtttgacgtgtcccacttccttgggcccggttgataacggtgattttttcgttaggaccaccaacggtttgccagtttgtgatttcgcctttaaagatgcctagcaattgtgcactggttaaatttttgatgcctaactttttattaacaacgggtgcgattgcaaccacagcaactttgtgatcaaccagtttcttagtatcgataccatctttttcttcagcgaagatgtccgagttaccgattgtgacgttgccaccactaatttgggttaaaccagttcctgaaccgccaccttgaacggtgacgttgactttagggttatccttttgatattgatcgccagcttgttcaacaaggggttgaagggctgtcgaaccaactgcagtaattttagcgccttgatcctggctttgacttgcactttttgattggccttgacaaccagctaataaaagagcggccgcgccaactgtgagtaatgccatactaatgcgtttcataatgattcctcctgaggactgatttaagggtacaagttcagtatagagacgtcgtgtaaagattgaccgctaattcgtgtaaaaaacgtaaatgataagtcgcgagtttgtaaatgattccgtgaggggcttgaagattgtatggctgcttattgtgccaatcgagctattttagcgccaattgaatgtgcagaaaagtcgggctattatatggaagtaaaagaacattatggacgctaaattaagggatgaataacccgaggcagattattgacttttagtagtaaaagaagtatattatacagtaactgcgaaaatccgtagaaaaatttattgtgctgatctattgtccagcacggtattcatgaaaaacaaaaatagttagtctgatttattcagcttaaaataactgtttttgttttttttctgctcaaaattacctaaaaatggcgatgtaatattttcttaatatttgtcatatttttgtaataatgaggctgcggaaaacttatagaggggtgaacaatttggcaggacacttagtgaattacggtaaacatcgtactcgtagaagctacgcacggattaaagaagtgctagaactaccaaacttgatcgagatccaatctaattcctatcaatggtttttagacgaagggcttcgtgaaatgtttgatgacattatgccaattgacgattttgctggtaacttatcattagaattcgttgattaccaacttcttgaacctaaatacacggttgaagaagctagacaacatgatgccaactactcagcaccattacacgttactttgaaattaacaaaccatgaaactggtgaaattaaatctcaagacgttttctttggggacttcccattgatgactgaccaagggactttcatcatcaacggtgctgaacgggtaattgtttctcaattagttcgttcaccaggcgtttatttcaacagcgctgttgataaaaacagccgcacaacttatggtacaactgtcattcctaaccggggtgcatggttagaatttgaaacagatgctaaggatattgcatatgttcggatcgatcggacacgtaagattccaatgtctgttttagttcgtgctttaggttacggttctgatcaagaaattatcgatatcttaggcgacaacgattcattaatgttgacgttagaaaaagatatccataagaatactgacgactcaagaacagaagaagctttgaaggatgtctacgaaagacttcgcccaggcgaaccgaagacagctgatagctcacgttcattactttatgcacgtttcttcgatgctaaacgttatgatttagctgctgttggtcgttacaagatcaacaagaaattaagcttaaagacgcgtttattgggtcaaacattagctgaaacacttgctgatcccgatactggtgaagtgattgctgctaaagatacagttgttgatcgtcaagtgatggatgctttggcaccatacttagacaaagaagacttcaagacggttacttaccaaccatctgatgaaggtgtcttaccagaaccaatgacactccaagtgatcaaagtgtactcacaaaaaacacctgataaagaaatcaacttaatcggtaacggtcatatcgatgccaagattaagcatgtcattcctgctgatatcatcgcttcaatgaactacttctttaacttacaagaaggtctcggttcaacggatgatattgatcatttagggaatcgtcggattcgttcagttggtgaattgttacaaaaccaattccgaattggtttatcacggatggaacgtgtggttcgtgaacggatgtcaatccaagacacaagcaccgtgacacctcaacaattgatcaatattcgcccagttgttgcctcaattaaggaattcttcggttcatcacaattgtcacaattcatggatcaaaccaatccccttggcgaattgacgcataaacgtcgtctatctgccttaggacctggtggtttgactcgtgaccgtgccggttatgaagttcgagatgttcactatacccattatggtcgtatgtgcccaatcgaaacccctgaaggccctaatatcggtttgattaacagtttggctagttacgctgttgttaaccgttacggcttcatcgaaacaccatatcgccgtgttagttgggatacgcatgatgttactgataagatcgactatttaacagccgacgaagaagataactatgtcattgcgcaagccaactcaccattaaacgatgatggttcattcgttgatgatactgttttagcacgttacaaagatgacaatattgaaacttcaatcgacaagttagattacatggacgtttcgcctaagcaagtagttgctgtcgctacggcctgcattcctttcttggaaaatgatgattcaaaccgtgccttgatgggtgctaacatgcaacgtcaagctgtgccattggttgacccacatgcaccacttgttgggacagggatggaatataaagcagcccacgattcagggattgctttattagcacaacatcccggaactgttgaatacgttgatgcgaaagtcattcgcgttcgtcgtgaagacagctcattagatacgtacgaattaatgaaattccgtcgttcaaatgctggtaagaactacaaccaacgtccaatcgttgcaaaaggcgatcacgttgatgttgatgaaattatcgctgatggaccagctatggaaaaaggtgaattagccttaggtcaaaacccattgattgctttcatgacttggaatatgtataactacgaagatgcgatcgttctttcagaacgtttagtgaaagaagatttatatacttcaatccatattgaagaatacgaatcagaagctcgtgatacaaaacttggacctgaagaaatcacacgcgaaattcctaacgttggtgaagattcattgaaggatcttgacgaattcgggattgtccgtgttggtgctgaagtcaaagatggcgacattttagttggtaaggtaacgcctaagggtgtgacagaattatcagccgaagaacgcttattgcacgctattttcggtgaaaaggctcgcgaagttcgcgatacatcattgaaagtacctcatggtggcggcgggattatccaggacgttaagatctttacgcgtgaagctggcgatgaattgtcaccaggtgttaacatgatggttcgtgtttacattacacaaaaacgtaagatccaagtcggcgataagatggctggtcgtcatggtaacaaagggactgtttcaatcgttgttcctgaagaagatatgccatacatgccagatggtaccccagttgatatcttattgagtcccatgggtgtgccttctcgtatgaatatcggacaagttcttgaattacatcttgggatggctgctagaaacttaggcatccatgttgcaacaccagtctttgatggtgcgcaagataaagatttatgggacgctgttcgtgaagcaaacatgccttctgatggtaagagcattctttatgatggtcggaccggtgaaccattcgatacacgtgtgtcagttggtgtcatgtactacatgaaactagcccacatggttgacgataaactccatgcacgttcaatcggaccttactcacttgttacgcaacaaccattgggtggtaaagctcaatttggtggccaacgtttcggtgaaatggaagtttgggctcttgaagcttacggtgccgcttataccttacaagaaatcttaacttacaagtctgatgacgttgttggtcgtgtgaagacatacgaagcaatcgttaagggtgaaccaattccaaaaccaggtgttccggaatcattccgagtattggttaaagaattacaatcacttggcttggatatgaaggtcttggatatcgataatcaagaaattgaattacgcgatatggacgacgatgatgatgatatcgaaaacatcgatgcattatctaaatacgctaaagaacaagaagccaaaaaggcacaagaagaagctgaaaaagcacaagcagcaaatgctgatgcagtagatccatctgctgaataaagcgtgctataaattatgaggaggtcggccctttgatagatgtcaataagtttgaaagtatgcaaattggtttagcatcttcagataaaatccgtagttggtcgtatggtgaagttaaaaagccagaaacaatcaactaccgtactttaaaacctgaacgtgatggcctttttgatgaacgaatcttcggacctacgaaagattgggaatgtgcttgtggtaagtacaaacgaattcgttataaaggaattgtctgtgatcgttgtggcgttgaagttacacgttcaaaagtgcgtcgcgaacgcatgggacatatcgaacttgcagcaccagtaacacatatctggtactttaaagggattcctagccggatgggtcttgtcttagacatgagccctcgtgcattggaagaaattatttacttcgcatcatacgttgtgattgatccaggcgatacagccttagaaaagaaacaactgatgaccgaacgtgaatatcgtgaaaaattagatgaatacggtaatcgttttaacgctaagatgggtgctgaagccatcaaagaattgttacgtgacgttgatcttgaaggcgaagttgctgaattaaaggaagacttgaagtcagcacaaggtcaaaagagaacgcgtgctatccgtcgtttggacatcttagatgccttccgtaaatcagggaataaccctgaatggatggttatggatgctattccagttattccaccagatttacgtccgatggttcaattggaaggtggccgttttgccacatctgatttgaatgatttgtaccgtcgtgtgatcaaccgtaacaaccgtttgaaacgtttgttagacttgatggcaccaagcatcatcgttcaaaacgaaaaacggatgttacaagaagccgttgatgctttgattgataatggtcgtcgtggccgtccagttactggacctggtaaccgtccattgaagtctctttcacacatgttgaaagggaaacaaggtcgtttccgtcaaaacttacttggtaaacgtgtcgattattctggtcgttccgttatcgatgttggtcctacattgaagttctatcaatgtggattaccacgtgaaatggcacttgaattgttcaaaccattcgtcatgcacgaattagtgaaacgcgatatggcttcaaacattaaaaatgcaaaacgtaaaattgatcgtcaagatgacgatgtttgggatgttttagaagatgtcatcaaggaacgcccagttctattgaaccgagcacctacattgcatagacttggtatccaagcattcgaaccaatcctggttgatggtaagtcaatccgtcttcatccattagcttgtgaagcttacaatgccgatttcgatggggatcaaatggcgatccacgtacctttatctgatgaagcacaagcagaagcaagaatgttaatgcttgccgctcaccatattttggcaccaaaagatggtaaaccaatcgttacaccttctcaagacgttgttttagggaactactacttaacgcttgaacaaaaaggtagtctcggcgaaggcatgatcttcaaagatacaaacgaagttttaatggcttatcaaacaggtcacgttcatttgcacagtcgaattggtttgtcagttgttgatatggataatcgtccattccctgacgaacaacgccacaagattatggtaacaagtgttggtaaagtgatgttcaacgaaatcatgccaactggcttcccatatttgaacgaaccaacaacagataacttgatgaatggtgtgccagataaatacttcatcgataacggtgaagatattcatgactacctctcaagtgccccagtgatcttaccatttaagaaaggcttcttaagtgatatcatcgcgcaagtcttcaaggtatataaggttcaacggacatctgacttattggatgatatgaagaccttaggttacgttcaagcgacccatgctggtttaacagttggggttgccgatgttcctcaattacctgaaaaacaagaaattgttgatgaagcccataagaaagtcacaacggtttctaaacaattccgtcgtgggttgattacagatgaagaacgccatgcgcgcgttattgaaatctggaacgatgctaaagacgatatccaacaacgactcacagattcgtttgatccaacaaacccaatctcaatgatgtctgattctggtgctcgtggtaacatctctaactttacgcaacttgctggtatgcgtgggttgatggctgctcctaatggtgggatgatggaagttcctgttacatcaaacttccgtgaaggcctctctgtcatggaaatgtttatgtctacccatggtgcccgtaaagggatgactgatacggcgcttaagactgccgattctggttacttaacacgtcgtttagttgatgttgctcaagacgttatcattcgtgaagaagattgtgggactgatcgtggtcttctcattcactcaattcgcgaaggtaatgaattaatcgaaccattgtatgaccgtcttgttggtcgttgcgcaatgaagaccattgttaacccaacaacgggtgaagtgatggttcaacgtaaccaattaatggatgaacaacttgctcaagctgttgttgatgccggtgttgaagaagtcacaattcgttctgtcttcacatgtaacacaaaacacggtgtctgcaaaaaatgttacggtcgtaacatggccaacggcgaagaagttgaagttggtgaagcagtcggaacagtcgcagctcaatcaatcggtgaacctggtacgcaattaaccatgcgtaacttccataccggtggggttgccggcggtgaagatatcactcaaggtttgcctcgtatccaagaaattttcgaagcgcgtaatcctaaggggcttgcaacaatcactgaagtaactggtgaagttgttgcggtggaagaaaaccctgcagaacatacacgtgaaatcactgttcaaggtgaaacagatacacgttcatatagtgtgccttacacagccaacgtcatcgttaacgaaggcgacatggttcgtcgtggttctaagttaacgggtggttctgttgatcctaaacaattaattaaagtccgtgacgtcttatcaactgaaaactacctcttgcatgaagttcaaaaagtttaccgtatgcaaggtgttgaaatcggcgataaacacgttgaagttatggtccgtcaaatgctacgtaaagtccgtgtcatggatccgggtgatacagaaatcttacctggtacattaatggatattagtgaatttacagaccgtaaccacgaaaccttaattagcggtggcgtacctgctacttgtcgtcctgtcttgcttggtattacgaaagcatcattggaaacaaatagtttcttatcagccgcatcattccaagagacaacacgtgtcttaacggatgcttctatccgcggtaagagcgatccattacttggtttgaaagaaaatgttatcatcggtaagattgtcccagctggtactggtatggcgaagtatcgtcatatggaacctaagacagtcggcgctgtatcagaaaatgtctactcaatcagtgacatcgaagcacagatgaaagaagaaacaaaagaataactgagtgccaatttagaacagttgctctaaattgcacgttaaagggcctcaccgacatggtgaggcccttttttatgtgtttgcaataaacaaaacgattaagacaccgtagctgatatacgggacaaatggaattgggcggcgtccgactaaggcgaggacaactggatggtggagactatcaatgagatatttgattaaacagaggagacaggcaattaataacatggatagggtgacctccaatccaaaccacaacccaagaattgccaataattcaatgtcaccagtaccgatgccatctgaaaagtagttgatgacagataaggtgctgccaatcaatagggcactgagccaatggtttgtcggccagtagtcaataaacaaaggcataaaagccagtaccattggaactgggtatagagctgtatggaaaatatcgactaggctcaacaaataaaggataagcaataaatagccaatctgtggtgtgaaatattgactggctaaacaacacgctaacaagccgccaataacctcactagtaaaaaaatggtgctggattcgagtatcacaatagcggcagtgccctctgagaatgaggtaactgataattggacataagtcgtaccaagcgagggcgtgatggcagaagtcacaccgtgaaccaggccatgtgatggataaaccgagtggccaacgccaagcacaaacagttaaaaaagaggcgcaacacgcgccaataacaaaggttaaaaaatatattaacaaacgtgtcatctcctttatgataactacaaaaaaagggcgcaactttttctgaaaaactggcttatagcacgttgactttcgtagttgtgcatgctattcttgtagatgtgctttttacggaagttttctgatattcagacatgctgactgacgtctaaaaatgcattacaatccacgcaatctaggttgccatttttttatcgcaaaaaaagaaccacctggatgtgtggacttaaaactcaaaaataactttcagatcaaggaaggaggaaccttcaaatgccaacaattaaccaattggtacgtaagggtcgtaaatcaagaacttcaaagtctgatgcacctgcattaaactttggctacaacagtatgaagaaaaaagctacagataatccagcaccacaaaaacgtggggttgctactcgtgtgggtactatgacacctaaaaagcctaactctgctttacgtaagtatgcgcgtgtgcgtttatctaacttaatcgaagttacagcttatattcctggtattggtcataacctacaagaacatagtgttgttcttatccgtgggggccgtgttaaggatttacctggggtacgttatcacgttatccgtggtgctttagatactgccggtgttgacggtcgtatgcaaagccgttctaagtatggtactaagagacctaaaaaataacacacaaaaaaatttgaaaaagtcgattgaagtttaaatgacactgtgtgttacttcaaggacttaaatatcttgaggaggttatcaggatgccaagaaaaggctatgttgcaaaacgtgacgttttacctgatccaatgtacaattctaaattggtttcacgcttaatcaaccgcttaatggttgatggtaaacgtggtactgcgtcaacaatcttatacgatgcatttgatattattaaagaagaaactggtaatgaaccattagaagtgttcgaagaagctatgaacaacatcatgccagtacttgaagttaaagctcgccgtatcggtggttctaactaccaagtaccaattgaagttcgtccagaacgtcgtacaactttaggtttacgctggttagtaagctatgctcgcctacgtggggaacataccatggatcaacgtcttgcacgtgaaatcatggatgctgccaataacactggtgctgcagttaagaaacgtgaagatacacataaaatggctgatgccaaccgcgcatttgcacattatcgctggtaagattaacaaggttggctgttatatgtattcaaatcatataatggcctcttgttgtatatagcttaatattcgagaggagtaatattcacttatggcaaacaaacgtgaatttccgttagacaaaacgcgtaatatcggtatcatggctcatattgatgctggtaagacaacaaccacagaacgtatcttgtactacactggtaaaatccataagatcggtgaaacccacgaaggggcttcacaaatggactggatggaacaagaacaagaacgtgggattacaattacatcagctgctacaacagctgaatggaaaggtaaccgagttaatatcattgatacaccaggacacgttgatttcacaatcgaagttgaacgttcattgcgtgttttagatggtgcaatcactgtcttagatgctcaatcaggtgttgaacctcaaactgaaaatgtttggcgtcaagcaactacttatggtgttccccggattgttttcgttaacaagatggacaaacttggtgctaacttcgattactcaatgacaacattggaagatcgtttacaagctaatgcacatgctgttcaaatgccaatcggcgctgaagatgaattccaaggcgttattgatttgatcgaaatgcaagctgacatctatgatgaagatgaattaggtgctaagtgggatacagttgatgtacctgctgactaccttgaagaagctacaaaacgtcgtgccgaattagttgaagctgttgctgatgttaatgacgacattatggacaaatatttagaaggcgaagaaatttctaaagatgaattgaaagctgctattcgtcaagcaactatcgatttgaaattcttcccagttttcgctggttcagctttcaaaaataaaggtgttcaaatgttaatggatggtgttgtagattacttaccatcaccattagacgtacgtccttataacgctaaaaacccagaagatgattcagaagttgaattgatggctggcgatgacaaaccatttgctggtttagcatttaagattgctactgacccattcgttggtcgtttaacattcttccgtgtttatactggtacattacaatctggttcatacattttgaatgcaactaaagacaaacgtgaacgtgttggtcgtttattacaaatgcattcaaatcaccgtaacgaaattcctgaagtattctctggggatatcgctgctgcaatcggtttgaagaatacaacaactggtgattcattgactgacgttgatcatccattaatcttggaatcaatggaattccctgacccagttatccaagtttctgttgaacctgaatcaaaagaagatcgtgataagttagatcttgctttacaaaaacttgctgaagaagatcctacattcaaggctgaaaccaacaatgaaacaggcgaaacgcttatttctgggatgggtgaattgcatttggatatcatggttgatcgtatgagacgtgaatttaaagtggttgccaaaattggtgaacctcaagttgcttaccgtgaaacattcacaaaacaagcatctgcacaaggtaaattcgttcgtcaatccggtggtaaaggtcaatatggtgatgtttgggttgaatttacacctaacgaagaaggtaaaggcttcgaattcgaagacgctatcgtcggtggtgtggttcctcgtgaatacatcccatcagttgaacaaggcttgaaagaatcaatggcaaacggtgtcttagctggttacccattgattgacgttaaagctaagttatatgatggtagttatcatgatgtcgattctaatgaatcagcatttaagattgctgcatcaatggcattgaagaacgctgctaaacaagctggcgctgaaatccttgaacctatcatgaaggttgaagttattgctcctgaagaatatcttggcgatatcatgggacaagtaactgctcgtcgtggtgctgttgaaggtatggaagcacgtggtaatgcccaaatcgttaatgcaatggtaccattgtcagaaatgtttggttatgcgacaacattacgttcagctacacaaggtcgtgggacatttacaatggtatttgaccactactcagctgttcctaagagcatccaagaagaaatcatcaagaagaacggtggccaataagccgctaatcttaagtgattggtttcgattggaaaaggactcgtcattgcgacgagtcctttttttgtacgtaaaaatgcgattttacagtttcgtaaatgaaagttcatatttaattcataactggttggtattctgtatacatcagatgaattcctcccaagaaataatctgaaaaggtaaaaatgcttttcaaggtggttagcttttgagcataacatagcgaggataatgagcaacgaaggtgatcgttgtcttcgcgtagttaggtggaaaaagttaccttgaaaagcaagattaaatgaattttcattagacaattcctccctaaagaatccgtctaagtaaagcaccgccaatgagttatagtttaatggtaaaacgaaccggcccatttgaaattcctcccaagaacagtgaatggttttctggtgattgatagagacttgctttcgaaggcgcaaggatttgttgatcattaagactggttcatgcgggttcaatccccgctaactcgatttgccaccgccctggcaaaaaaactcaaactctttttcatataaacttctccaaaaaagggagttacgacaaaaatcacttttgtcgtaactccctttttgtgtttctaggcacggcttactgagttagttttgttttgtaggacgtgttttcaaactgcccatcagacgtttaacctttgcttgttcgatttcgcgggcggatagttgactatagtccgcttcgatagccagtttattgaaatcagctagccgttcaggcattaatgaacctgcatcgattgcggctcgtacggcgcaactgggttcgctttgatgctggcaatccttaaatcgacagtcctgtgcgagcgtctcaatatcagtaaagactgtcttgagtgccttagacatgctacttgtcatgccgagttcgcgcatgccaggagtatcgacgatgaaggccccgctagcagtttgataggcttgtcgattggtggttgtgtggcgccccttatcatcgtcagcgcgaatgccgctcgttaaaacggaaggctctttaatgagctggttgatcagggttgatttaccaacgccggatgagccgacaaatgtcacccattgtccagctgttaaatacggtttgaaagtcgctgcaacatttgatgccgtctggccagttgtgatgacgggaacgctgtcgaatgtcacacttgcgatggcgtcaagaaaggttgttagctcagagtcgctgactaaatcggttttactcaaaacaatcaccggtgttgcgccgctatcccaagccatcgttaaatagcgttgtaagcgcgcttcgctgaattcttgattggcggatgttacgatgaaaatcgttgcaatattggccgctaaagtttgaatccatagaatgggtacattgtcccgtcatttaagatagcagatgatcgttaaaagtcaaattagataattgtagctccgaggctgtttttaaaatgcgcgagtgcccattcttgcccgttcggtgtaaaagttgcgacagcagcggctggaattgttagtgggtaatttaagttgtatgccgagactgcagtgtggagcacgcaaatgtcggtgcaaacgccagtcagtgttaacgcgtcaatctcgcgctcgcgtaagaaattatccagattagtgttagcaaatgctgaatagcgattctttgcaaatgcatagacgtgaggatcggtttggtgcttggtgtaccagctagctagtggtccgtaaaactcatggccccaagtattggctagattatgtggtgggaatagggcgctctctggatgaaatggatcatccttgacgtgtaaatcagtcggtaagatgacgtaatcaccggctgctaggaactggttagctaattcgataattacaggaacgattttctgagcgggtttgccggctgtcagagcaccgtttgggtcaacgaagtcatttgtatagtcgataatcaaaagtgcgttatgggacatgataaggacctcctggaggggatttaagttgctttcagtgtatcaaaacatggctagaaatccacgaatgacgcttgctacaagatttatgaaaatgttatgaaaaactttgataaatcagcaaaaaagggttgcgttatcgggttgtatcttgtaagatagataaagtgctatttccatagcaggagtgcgcaccatggtagtcaaaaagattaccgagtagctaagatgtgagaggttgcgacacacccggccgctttgccatgggcgggcgtgccggaaaaattttcacggagctagtctacttttaaaatagacgaaggagggaaaaacatggcaaaacaaaagattcgtattcgtttgaaagcattcgaacaccgtattttggatcaatcagctgacaagattgtggaaacagcaaagagaacaggtgctactatctctggcccaatcccattaccaactgaaagaacactttatacagtgcttcgttcaccacataagcataaagattcacgtgaacaattcgaaatgcgtacacacaaacgtttaatcgatattgttaaccctacacctaagacagttgattcattgatgaaacttgacttaccaagtggtgtagatatcgaaatcaagctttaattcgtaccaaccaattaaaaatactagaaaagaggtgttaccatgaccacaaaaggaatcttaggtagaaaagtaggtatgacacaagtctttactgaaaacggcgaattaattcccgtaacagttatcaaagcaactccaaacgttgttttacaagttaaaacaaacgaaacagacggctatgaagccatccaagttggttttgaagataaacgtgaagtcttgtcaaacaaacctgctaaaggtcatgtagcaaaagcaaatactactcctaagcgcttcattagagaattcagagatgtcgcattaggagattacgaagtaggaacagaaatcaaagttgatactttcgcagccggcgacgtcgttgacgttactggtgtaacgaaaggtcatggtttccaaggtaacattaaaaaagacggacaatcacgtgggcctatgggtcacggttctcgttaccaccgtcgtcctggttcaatgggtgctgttatcaaccgtgtcttcaagggtaaattattacctggacgcatgggtaacaaccaacgtactgttcaaaaccttgtggttgtaagtacagatgttgaaaagaacgttatccttgttaaaggtaacgtgccaggtgctaaaaactcaatgattacaatcaaaacagctgttaaagctcgtaacaaataatctgagaagggaggattttaccaatggcaaacgtaacattatttaaacaagatggtagccaaaatgggaacgttgaattaaacgactcaatctgggctatcgaacctaacgaaaacgttgtgtttgatgcaatcatcatgcaacgtgcttcattaagacaaggaacacacgctgttaagaacagatcagctgttcgtggtggtggtcgtaaaccttggcgtcaaaaaggtacaggtcgtgctcgtcaaggctcaatccgttcacctcaatggcgtggtggtggtaccgtatttggtcctacacctcgttcatacagctacaaattacctcgtaaagtacgtcgtcttgcaatcaagtcagtactttcacaaaaggttatcgacaatgatttagttgttgtagatgcattcaactttgacgcacctaagactaaagaattcgctgaagtacttaacaagttagacgttaatactaaagcattggtagtacttgaagacggaaatgattttgctgcattatcagctcgcaacttacctaatgtaactgttgtagctgctgatggtatcaacgtattagacgttgttggcaaccaaaaattaatccttactcaagctgctctttctaaaattgaggaggtgcttgcataatggaagcacgcgatgttattttacgcccagtagttactgaaaattcaatggctgcaatggacgacaagaaatacacatttgatgttgatgttcgtgccaacaaaacacaagtgcgttacgcaatcgaagaaatctttggtgtaaacgttaaaaacgtaaacatcatgaacgttcgtggcaagttaaaacgtcaaggtcgctatgctggctatactaaaaaacgccgtaaagcaatcgttactttaactgctgattcaaaagaaatcaagattttcgaagattaagcaacacttaaatagaataattataggagggtatacacgtgggaattattaagtacaaaccaaccacaaatggtcgtcgtaatatgaccagctcagattttgctgagatcacaaagacaacccctgaaaagacgttgttggaatcccaaagccatactgctggtcgtaatgcacatggtcatatcactgttcgtcatcgtggcggcggtcataagcaaaaataccgtgtcatcgacttcaaacgtatcaaagatggtatcaaagcgactgttaagtcaattgaatacgatccaaacagaacttcaaatattgcattaatccaatatccagatggtatcaaagcatacatcatcgcccctaaaggtcttgaagtaggcatggttgttgaatctggtgtggatgccgatattaaagtaggtaacgcattaccattagctaatattcctgatggtacacttatccacaatatcgaattaaaacctggtaaaggcggccaattggttcgttcagctggtacatcagctcaattattaggtaaagaaggcaaatacgctatcgttcgtttaacttctggcgaaacacgtatgatcctacttacatgtcgtgcaacgatcggtactgttggtaacggtcaacacgaattaatcaagattggtaaagctggccgtaaacgttggatgggtatccgtcctacagttcgtgggtcagtaatgaaccctaacgatcatcctcatggtggtggtgaaggtaaagctccaatcggtcgtccttctcctatgtctccatggggtaagaagacgcttggtaagaagactcgtagtagtaaggctcgttcagagaaacttattattcgtcatcgtaaatcaagataatcaattccaattgaacatgtctaaagccaatgcggcttaaacataagtcacattgaactttttattcgaaggaggtttcataatgagtcgtagtttgaaaaaaggaccattcgcagacgcacacttgctcaacaagattgaagcacaagccgatagcgaaaagaaacaagtcatcaagacttggtcccgtcgctcgacaattttccctagctttattggctacacaatcgctgtttatgacggacggaaacacgttcccgttttcatctcagacgatatggtaggccataaattaggtgaattcgtaccaacaagaactttccatggtcatggaaatgacgataagaaaacaaaagcacgctagaaaggaggatgaactcaatggcagatcaaattactagtgcaacagctagcgcaaaatcagttcggatggcagcccgtaaagtacggatggtagtcgacttgattagaggcaagagcgttgcagaagcaattgcaatcttagaatttacaccaagagctgcttcaccagtcgtaatcaaagttttgaaatcagctatcgctaatgcagaacataattacgacttagatgcagaaaacttggtcgttacagaagcttatgctaacgaaggaccaacattgaaacgttttcgtcctcgcgctaaaggctcagcatcaccaatcaacaaacgtacaagtcacatcactgtagttgtatcagaaaaagaagcataaggagggatatcgcgtgggtcaaaagattaatccaaccggttttcgtgttggcgtcatccgtgattgggacgctaaatggtatgcagaaaaagatttcgcaacattcttacacgaagatcttaagattcgtaaatatatcaacacaaaattagctgacgcatctgtctctactattgaaatcgaacgcgctgcaaatcgcgtgaacgtttcaatccatactgctaaacctggtatggtcatcggtaaaggcggttctgaagtagaaaatctacgtaaagaattaaacaacttaacaggtaagaaagtacacatcaacattgtggaaatcaagaaacctgatttagacgctcacttagtaggtgaaggcattgctcgtcaattggaagcacgtgttgctttccgtcgcgctcaacgccaagctatgcaacgtacaatgcgcgctggtgctaagggtattaaaactcaagttgccggccgtttgaacggtgctgacatgtctcgtgtcgaaacacatgctcaaggaactgttcctttgcatacgctacgtgcagacatcgattattcatgggacgaagccatgactacttacggtaaattaggagttaagacttggatttatcggggcgaagtattacccgctaaagccaacaacaatacgaaaggagggaaataaacatgttagtacctaaacgtgtaaaacatcgtcgtgaattccgtgggaagatgcgcggtgctgcaaaaggtggcaaagaagtcacttttggtgaattcgggctacaagctttagaatcaagttggattaccaaccgtcaaatcgaagctgctcgtgttgccatgactcgttacatgaaacgtggtgggaaagtgtggattaaaattttccctcacaaatcatacactgcaaaaggtgtcggcgttcgaatgggttcaggtaagggtgctcctgctggatgggttgctgtagtaaaacgtgaaaaagtcatgtttgaaatcggcggcgtttctgaagaagttgctcgtgaagcattacgcttggcatcacataaattgccagttaaaactaagatcgtaaaacgcgaggaagtaggtggcgagtcaaatgaaggctaaagatattattgaattaaccactgctgaaatgcttgaaaaagaacaccaatacaaagaagaattattcaatcttcgtttccaacaagctaccggtcaattagaaaataccgcccgcttaaagcaagttcgtcagaacattgcacggattaaaactgtattacgtcaacaagaacttaacaaataataaatggaaaggagctatttactttgagcgaagaaagtcgtaaccatcgtaaagtgtaccaaggccgtgttgtttcagacaaaatggataaaacaattactgtcgtggttgaaacttataaaacacatcctgaatatggtaaacgtgttagatattcaaagaaatattatgcacaagatgacaacaacgaagcaaaagttggcgacgttgtgcgtgttatggaaactcgtcctttgtcacgtacaaaacggttccgtttattagatgtcgttgaaaaagcagttattatctaaatcgttactcaatatatataagtgacggaaggaggacctataagtgattcaatcagaaagtcgtcttaaggttgctgataactccggtgcccgcgaaattttaactattaaagttttgggtggttcaggtcgcaagactgctaacatcggtgatgttatcgttgcaacaattaaacaggcaacaccaggtggcgttgtcaaaaaaggtgaagttgtcaaagctgttatcgttcgtactaagtcaggtgctcgtcgtgcagacggttcttacatcaagttcgacgaaaacgctgctgttatcatcaatgatgacaagactccaaaaggaacacgtatcttcgggccagttgcacgtgaattgcgtgacagtgatttcatgaagatcgtttccttagcgcctgaagttctataattacagacaaccaaggaggtgcgtatatcaatgttcgttaaaactggtgataaagttaaagtaatcagtggtaaagataaaggtaaagaaggtacaatcatcaaagctatgcctaaagaaggccgtgttgttgttgaaggtatcaataccattaaaaagcatgttaagccaaatgctcaaaaccctaatggtgggattgttgacacagaggcaagtatcgatgcttcaaacgttatgctaattgatccatcaaccaacgaagctactcgtgtaggtttcaaagtgattgatggtaagaaagtacgcgtttcaaagaaaactggagaatcaatcgataaataatcttttggggaaaggaggcactttttacatgactaaccgtttaaaagaaaaatatgttaaagaaatgacaccagcgttgatcgaaaagttcaactacacatcaagcatgcaagtacctaagatcgaaaagatcgtacttaacatgggtgttggtgatgctgtttcaaacgctaagaatttggataaagctgttgaagaattaggtttgattgctggtcaaaaaccattaatcacaaaagctaagaaatcaatcgctggtttccgtttacgtgaaggtatgccaatcggcgctaaagtaactttacgtggcgaaagaatgtacgatttcttagataaattagttaacgtatctttacctcgtgttcgtgattttcacggtgttagtgcaaaatcattcgatggtcgcggtaattatacattaggtgtacgcgaacaattgatcttccctgaaatcgattatgataaggtagatcgcgttcgtggtttggatgttgttattgtaacaacttcaaatactgacgaagaagcacgcgaattgttaacacaatttggcatgccatttgctaaataaaaagggaggtcaatttcttggctaaaaaatctttagttgtaaagaatcatcgtccagcaaaattttcaacacaagaatattcacgttgcgaacgttgtggacgtccacattctgtatatcgtaagtttaagctttgccgggtttgcctccgtgaattagctcataagggccaaattccaggcatgaaaaaagcaagctggtaattataaagagtcaataaggaggttaattccacatggtcatgacagatccaatcgcagactatctaacacgtattcgtaatgccaacatggtacatcacgaatcattagaagtccctgcttcacgtatgaaaaaagaaatttctgaaattttgaaacgcgaaggctttatccgcgattacgaagtgattgaagacgacaaacaaggtatcatccgtgtattcttgaaatatggtaagaataacgaacgtgttatctctggtttgaaacggatttcaaaacctggtttacgtaattacgttaaagctaatgatgttcctaaggtattaaacggcttaggcatcgcaattatctcaacaagcaacggtgtcgtaactgacaaagaagctcgtgaaaaggctgccggcggcgaagttctcgcatacgtttggtaatctaaacttaaaataaggaggtgtcataacgtgagtcgtatcggattaaaagtaatcgaagttcctgcaggtgttaccgttactaaagacggtgaaaacatcacagttaagggacctaaaggtgaactaacacgtcatttcagtccagtgattgaaatgcacgaagaaggtaaccttatcaactttacacgtaatagtgaaagtgatcgtgcaatgcacggtactatgcgtgctaacttaaacaacatgatcttgggcgtaacggaaggtttcaagaagacattggatcttatcggtgttggttaccgtgctcaattgaaaggcaagactttagtattgaacgttgggtattcacatccagttgaaatggaagccccagaaggtgttacagtcgaagtcccatcaaacacaaacatcatcatcagcggtattagcaaacaacaagttggccaattcgcagctgaaatccgtgatgttcgtcctccagaaccttacaaaggtaaaggtattcgttatactgatgaatatgttcgccgtaaagaaggtaaaactggtaaataaagcagcctgagctgttaaacgatattaagaggtgaaaattgtgattacaaaaccagacaagaataagacacgtcaaaaacgccatacacgcgttcgtggcaagatctctggtactgctgactgcccacgcttgaacgttttccgttctaacaaaaacatctacgctcaacttattgatgacgtagcgggtgtgacgctagcaagtgcctcaacattagataaagaagtaaaagcagaaggtactaaagtagaacaagcacaacaagttggcgcattagttgcacaacgcgctgttaaagccggccataaagttgttgtttttgatcgtggcggttacttataccacggtcgtatcgaagctttagctacagctgctcgtgaaaacggactagaattctaataaggaggaaaaccatttatgacttacattgatccaactcatttagatttagaagatcgcgttgtttcaatcaaccgtgttacaaaagttgttaaaggtggacgtcgtctacgtttcgcagcaatcgtaatcgttggtgataaagacggtcacgtaggtttcgggacaggtaaagcacaagaagttcctgaagctatccgtaaagccgttgaagacgctaaaaagaatcttatcaatgttcctaaggtcggaacaacattacctcatgaaattattggtcgcttcggcgctggtcgtgttctattaaaaccagctgttgaaggttctggtattgctgccggtggtgctgttcgtgccgtcatggaattagcaggaatcgatgatgtgacaagtaaaacattaggtagcaaaactgctatcaatgttatccgtgccacaattgacggtttaactcgtatgaagactgctgaagaaattgcagaattacgtaatgtatctgtagaaagcttacaaaactaggaggataactgaacatggctaaattaaagattactttaagaaaaagtgctgctcatcgtcttccagaacaacgtaaaatggtcaaagaatttggcttgaaccgagtaaatagttctgtaatcaaaccagatgatgctgcaactcgcggtgtgattttcaaactcgcacatttagtaacagtcgaagaaattaaagactaatttcaacatatattgcaaggaggtgcgcacaataatgaaattacatgaaatgaaacctaacgaaggtgctcgtgacgttcgtaaacgtgtcggccgtggtacttcttcaggtactggtaaaactgctggtcgtggtcaaaaaggccaaaaagctcgtagtaaagtacgtttaggatttgaaggtggacaaatgcctttattccgtcgtatgccaaaacgtggattcaagaatatcaaccgtaaggaatatgctgttgtcaacttaaacgatttaaatcgttttgaagacggtgcagaaattacttcaactgttttaatcgaagcaggcgttgttaagaatgaattatcaggtgttaaattattagcgaatggtgaattaaacaaaaaattgaacattaaggtaagcaagtattctgaagctgcaaaagctgctgtagaagctgctggcggttcaattgaggtgatttaattgctaaagacactcaaaaacgcatttaaagtaaaggaaatccgtagtaagattttgtttactttaggcgttttgatcgtttatcgtttaggtgcacaaattacggtaccaggtgtgaatgctggtgcattgactaagttgggttcaactggtttgatcccattgcttgataccgtaagtggtggtggcttggcgaactattccatcttctcgatgggggtttcaccattcatcactgcccaaattgtggttcaattactacaaatggatattgtgcctaagtttgttgaatggagcaagcaaggtgaagttgggcgacgtaagcttaaccaagtaacgcgttacttaaccatcatcttagcgtttatccaatcgatagggattaccgctggctttaactcactcagtcaaatgggcttggttaaagatccggggattaagaccttcgttagcatcgggatcattttaacgggtggtacgatgttaattacatggttgggtgaacagataacggataaaggcttagggaatggtgtgtcaatgatcatctttgcagggatcattgcacgccttccaagcggtctttaccaaatcttccgcgaacaagtcttgaacgcttcaaaaggcgatatgtggaaaggtgtcttattcatcatcggtttgattattgcagtactcgtgattgtcacatttgtgacatgggtccaacaagcaaatcgaaagattccgattcaatatacgcgtcgtgaagctggtgcaggtgaaaatagttacctaccccttaaagttaacgtcgctggtgtgattccggttatcttcgccagttcatttattatgacacctcaaacaatcttactggccttccaatcaggtcatggtgcagatacttggtttaaagtattatcagatatcttcagcatgcagactgtgacaggttcgattgtttatacggtgctcattgttctctttaccttcttctatgcttttgttcaggttaaccctgaaaaagttgcggagaacttgactaagcaagggagttatatcccaggtgtttggccaggtaaaggtaccgagaagtatctttctagcgtattaatgcgtctttcaactgtcggtgcgttgttccttggggtaattgcattattaccacaattagcagcaaacctcggtggcttaccccaatcaattggtttgggtgggacgagtttactaatcgttgttggtgttgcgcttgaaagcacacgtcaactcgaagggttacttatgaaacgcaagtatgttggattcattcgataagcaattatcgtttaaaaagtattgaatcctggttttaaataggaggcaaaggcatgaatctcatgttaatgggacttcccggcgctggtaagggaacgcaagctgaaaagattgttgacgcttatcatattccacacatttcaactggtgacatgttcagagctgctatggcagatcaaacagaacttggggttaaagctaagtcattcatcgataaaggtgaattggtaccagatgatgtgaccaacggaattgttgaggaacgtcttgcacaagcagatactaatgtaggttatctccttgatggttttcctcggactcttgatcaggcggatgctttagctgccattactgataaattgaacaaacctttagatggtgtgattaacattgatgttgatcctgaaatcttggctgatcgtttatctggccgctttatttgtaaaaattgtggtgcaacgtaccacaaactttaccatccaactaaagtggaaggtacatgtgatcgttgcggcgaacatgttttcttccaacgagaagacgacaaacctgaaacggttaagaatcgcttaaaggtcaatatcgaaatgaatacacctttacttgattattatgaaaaacgtaacctactttacacggtagatgggaatcaagaaattgatgatgtgttctctgccgttcaaaaagtacttgataccattaaagactagtcatcaactcaagtgatctcacggtcattgttcacgtaaaagcctgactagttgtttaatgacagaattctcagtgcttttaaaaatttaatacttgtgatataatatctcggtatgaccactagcggtgagtgcggagagctctcaccatttttctgtatgaattttcacaaccacaagggggtacttttgcgtggcaaaagatgacgtcattgaaattgaaggtaaagtaactgatactttaccaaatgcaatgtttaaagtagaacttgaaaatggtgcagttattctggcacacgtttctggtaaaatccgtaagaactacatcaagattttacctggagaccgtgtgacagttgaattgtcaccctatgatttgactaagggacgaattacgtatcgctttaaataggcgtaaggatcatatcaaggaggtcagtcgatatgaaagtaagaccatcagtaaaaccaatgtgcgaacattgtaaagttatcaaacgaaaaggccgcgttatgattatctgcgcagctaacccaaaacataaacaacgtcaaggttaatattaattaagcaggaggtgcaagaatggcacgtatcgcaggtgtggatttaccacgtgataaacaaattgtgattgctttaacttatattttcggtatcggaaatacaactgccgttaaagtcttggctgatgctggcgtcgcagaagacgtccgtactcgtgatttaacgccggatcaagaagacaagatccgtgcagcaatcgacaaagttaaagttgaaggcgatcttcgtcgggaagttagcttaaacatcaaacgtctacaagaaatcggttcttatcgtggcatgcgtcatcgtcgtggattaccagttcgtggtcaaaacacgaagaacaacgcacgtactcgtaaaggtaagaaagttacgattgcaggcaagaagaaataatcagtaaaaggaggttataatttatggcaaacaagaaaaatgctccacgtaagcgtcgtgtgaagaaaaatatcgaagccggcgttgcacatattcactcaacatttaacaatactcttgtgatgatcactgatcctcatgggaatgctgttgcatggtcatctgctggttcattaggtttcaaaggtagtcgtaagtcaacaccttttgctgctcaaatggctgcagaagctgctggtaaagaagccatggaacatggtatgaaatctgttgaagttgctgttaaaggaccaggttctggccgtgaagctgcaattcgctcattacaagcaactggtttagaagttactgctattcgtgacgttacaccagttcctcataatggatctcgtcctccaaaacgccgtcgtgtttagtctgggctacgcttcattttgagacaaactgaaacgtgttcacgtataaacacttctcgttttgaaaggggtaaaagataagaatgatcgaatttgaaaaaccaaacattacaaaggttgatgaaagtactaactacggtaagttcgttgtagaaccacttgaacgtggctatggtacgactttaggtaactctttacgtcgtattttactcgcttctttaccaggtactgctgtcacagatattcaaattgatggtgttttacatgaattttcaacaattgatggcgtcctagaagacgtaacacaaatcatcttgaatattaaaaaattagcacttaaattgcatgttgaagaagacaagacaattgaaatcgatgttaagggtccggcaacagttactgctgctgatatcatttctgatgatgacgttgaagtcttaaatactgatcaatatatttgtacagtagctgaaggcggcaatttccacgtgcgaatgacagttaaaaaaggccgtggttatgttgctgctgatcaaaacaagtcagacgatatgccaattggtgttttgccaatcgactcaatttataccccaatcagtcgtgtcaactatcaagtagaaagtacacgtgttggtcgtcgtaacgatttcgacaagttaacacttgatgtttggacaaacggttccatcagtcctagagaagctattagcttagctgcgaagattatgacagagcatttggcaatctttgtagatcttactgatgaagcgaaaaatgctgaaatcatggtcgaaaaagaagagacacataaagagaaaatgcttgaaatgacaattgaagagttagatttatcagttcgttcatacaactgtttgaaacgcgctggaatcaacactgttcaagagttaactgacaaatcagaagcagatatgatgaaagttagaaatcttggtcgcaagtcgttagaagaagttaagaacaagttatttgatcttggcttaggcttacgcacagaagaataaactgataagaaggagggactccattcatgagttatcgtaaattaggtcgcacaagctcacaacgtaaggcaatgttacgtgatttgacaactgatttaatcatcaatgaacgtatcattactacagaagctcgtgccaaagaaattcgtaaaacaactgaaaaaatgatcactttaggtaaacgcggtgatttacacgctcgtcgtcaagctgcagcattcgttcgtaacgaagtagctgatattcgcgaagaagacgatgctgtaatcgttcaatctgctttacaaaaattatttagtgacattgctccacgttatgctgaaagaaatggtggttacacacgtattcttaaaacagcccctcgtcgtggtgacggtgcattaatggtgattattgaacttgtttaatcacaaaatgatttaggtcatttgatcgatgagacagggcgttatgatgatggaagtactccgagtctagtcctaaggtcatactagcaacacagtatggctttcatcgattgatgatttacataaaataacgtctaattccgagttaaatcggagttagacgttttttgtgttggatatcctttgaataaagggtgactaacgaaagcgctatggccttttatatgataaaatagggacaggtttttgatttgaaacgtgcatggataacataaccaatgcactttaattccaaggaaaatacgggttattaatcatgaatgagcaaaaaataattcaagttgaacatttaaaatatgaatacccacaatctgaaggacatttagcactgaatgatctttctgtcagtatcaatgccggcgaatgggtcgccattatcggtcataacggtagtggtaagagtaccttcgcgaaatcattgaacggtttgttagatttacaatcgggatcagtgacgattgatgggttaccattgtcgttggataacgtgtggactattcgccagaaaattggcatggtttttcagaatccggataatcaatttgtcggtgcaacggttgaagacgatgttgcttttggtctcgaaaatcaggggattccgcgagctgaaatgattgaacgggttaaagacgcggttgaacgtgttggtatgagtgaatacttgaaacgtgaaccaagccgtttgtcgggtggccaaaaacaacgagtggccttagcagggatcatcgcacaacaacctgagattctgattctcgatgaggccaccagtatgctagatccaaaagggcgcgaagaagttctcgcaaccatttataagttaaaacaagaaacaaacatgaccgtgctatcaattacccacgatattgacgaagccgcaagtgcggaccggatcattatcttagataaggggcaagtgcatgatcagggcacaccggccgatatttttgcatatgggcaacgtttgcttgatttagggctagatgttccatatccagaaaaacttaaagcagcgctaaatgaacgcgctatcgagatgcccacagattatctcacaacggaaaggatggttgagtacttatggacattacattcaaaaatgtaagctacacttatcagccaggcacgccttttcaagggattgggctagaaaatatcaatgtgaccattccaagtggctcctatacggctttgattggtcatacaggtagtggcaagtcgacattgctccaacacctcaatgcactcttaaaaccaacgagcggcgttgttcagattggtgagcgcgaaatcacgcctgagaccaacaacaaaaacttaaaggctgttcgtcaaaaagttgggatggtttttcaatttcctgaaagccaattatttgagtcgacggtgcaaaaagatattgcttttggtccgcagaacttcggtgtccctgaagctgaagcacttgaacgcgctaaagagatgattgaactcgtcggtttacccgctaacgtgattgacaagtcaccttttgatttatctggtgggcaaatgcgccgcgttgccattgctggtgtgttggcaatgaaaccggaagtattggtcttagatgaaccaaccgcggggctcgatccagttggccggcgtgagatgatgacgctttttgaaaagttacacagtgagcaggggatgacgattgtgatggtcacccatcagatggatgatgtggcgaactacgccgacaacgttatcgttttggaacatggcaagctagctaagaccggagcaccacgcgaaatttttgcggatccggattggttaacggaaaaacaacttggcttaccaacaacgactcagttcgcgcaagctttaatgcgacaaggctttgtctttgatcaagtaccactaaccgaacatgaattggccgccttattagcggaacaactaccgaagaaggcggggattggacatgaataaattaattctgggccgatatatccccggtgattcagtgttacaccggatggatccacgggcgaagttattagccagtttttattatattgggatcatctttttagcgcgtacatggcaagcctatgctttattactggtctttacgttagcgctaatcgggatttcaaaaattaaactcgacttctttattaaaggagttaagccgctgttatggctaattctatttacagtgctcttacagattttcttcacccgtggtggtcatgtctattggcagtggggatttctgacgcttacccagtacgggctgattaatggcgtctacatcttcatgcgctttgtattgattattttcatgtcgactctcctgacattgacgacgccgccattgtcgttagcggatgcgattgaatcaattctcaagccgcttaaagtagtccattttccagtgtatgaagttgcattgatgctatcaattgcattgcgctttgtaccaacattgatggatgaaaccactaagattatggatgcgcaacgtgcgcgtggggttgattttggtgaagggaatttattccaacaaatgaaagcaatcgtgccgattttaattccgttatttgtcagcagttttaaccgcgcggatgatttagcaacggcaatggaagcacgggggtaccaaggtggcgaaggccgcagtaagtaccgaattttgaaatggcggacaagagacaccgtggcatttatcacgatgggccttttaaccgtcgcacttttattcttaagataacgcaaaaaggactcagttaaaccaacggaggttgatttagctgagtccttttttttttgcacttttttgattagcttgtttttttgaaccgacgtttcaacgttgaagcactaatgccagtttggtaactaatttgagcgtacgtaaagccctcttcacgcatgtctagggctgcttgtatgttcatcatcagtataggtcgttttacgaccttcagtgtaactagggttggtgacacgagcattatggttcccttcctgggtacgagtgagaatcatatcgcgctcaaattgcgcaaaagcactaaataaggtaaaaatgagtcgtccggaaggggtgtcttcaatgatgcccatgttcaaaatatgaattttaatgcgggctttaaaaagttcttggatgatttcaagtgcttctttggtatttcttgcgaagcgatcaagttttgtaacaacgatggtatcaccacttgaaacccgatctaatagttcattaaatttagggcgatcaacggtagttccggtaaacttttcgctgtagataatgtcacagctttcttcctttaattgactaatctgggttgctagactttgtccggcagatgaaacgcgtgcgtatccgaacttcattgcacaattctccttatttctacttataataataattatacagcatttgaacttgttttatattaaaaatgcatttttaaatcaaattttttacgaacattcataaaaagattgctacttttcagaaaattatttagaatagaactactaactttttaacacaagagggataaaatgacacaacggtatcgcgtaacaattgcctatgatggaacggattttgcgggtttccaagtgcaaccgaaccaacgaacagtacagggcacattagaaaaagcactgacaaagatgagtaagggtgcttatattcaagtgtatggttcagggcggacggacgcaggtgtccatgcaacggggcaggtggtccatttcgactatccaggtcaattacccgctattagtatgttacgggccttaaatagcctcttaccgcttgatatggaggttgtggatagtcagttagcgggcgatgactttcatgcacgattttcaacggtcggtaaacggtatatgtatcgggtcgatcttgggcattatacgaatccattcaagcgacgttataccggtcattatccgtatccaatcgatgtggaacggattcaagcggcgctgccagatgtgatgggcacgcatgattatacgagttttgcggcttcaggtggggtcattaaggataaggtgcggacgatttatgatgcgaccgttgttttcaatgaacccgaaaatgaactcgtttttgagttttatgggaacggctttttgtataacatggtgcggatcttggtcggaactttattagaaattggtaacggtcggcgggatgtccacgattttttacggctgtatgaagttaaggaccgtcaacaagctcgctcaaccgcgccagcaagcggtttgtaccttaaaaaagtttattacgaaactgatgaaaataattgagattcaattgacttaatcgtgaaattacgatactatagtatctggtattgtttgccccacgataggccccggaaacttattgagtgtcaaacaaacacagaatattggaggaataaatcgtgcgtacaacttacatggctaaaccaggcgaagtagaacgtaaatggtatgtgatcgatgcaactgatattgcattaggtcgtctatcaactgtagtcgcttctatcttacgcggtaaaaataaaccaacatttacacctaacgttgatacaggtgataacatcatcgtcatcaacgctgaaaaaattaaattaacaggtcgcaaagcaaccgacaagttatatcatcaccatagtaaccatcctggtggtttgaaaactcggactgctggcgaaattcgtgaaaacaacccagaacgtttaattgaaatgtcagttaaagggatgttacctaagaactcattgggtcacaaccaattcttgaagttacacgtatacgctggtggcgaacacaaacatcaagcacaaaatccagaagtcttagacattacggacattatttaaggaggaaactatagtggctcaagtaacttataacggtacaggccgtcgtaaaaactcagtagctcgtgtacgtttagtaccaggtactggtaaaatcactatcaacaacaaagacgttgttgattacattccatttgctaacttgattttagatatgaaacaacctttaacaattactgaaacaacagatagctatgatatcttggtaaacgttaatggtggtggattctcaggccaagctggtgcaatccgtcacggtatttcacgtgccctattgacagttgaccctgacttccgtccagctcttaagagcgctggcatgttaacacgtgaccctcgtatgaaggaacgtaagaaaccaggtctgaagaaggcgcgtaaggcatctcaatttagcaaacgttaatatcgttatgctaccgagatggaaacgttggtacgacaacgtttcaaacgtatctcgtttaggaaagtggttctcccaattagggcgagccactttttttgtccctcgtttttgtgcgcgttttgtgcgcgtgtctctgtcgagggtcatttgcatcgcgaccttttagggcgtcagctcaagccttacgttgctttgtgcgtcaattttaacgagtttcgttgagtttcatttcctgcgcgagtgaattcttgcgcgcctctgcgatccgttcagcgaacttattatgcacatccagaccgaccacatcaggggtgtttacgtaaatccgcgtggtcttaatatcggagtgcgtcagcgcttcggagatcagttcgaggctggcaccaccttggcgagctagagtggagaacgtgtgccgcagcttgtgtggcgtcacgcgcaccagctcctctgcatggcgcttgtagattgaattcagtcgatagttcaagtagtccgcatggagcggttgattgatacctcctctaaagttggtgtaggtgaataggaactgatctgggccagcttggatattcacgtcagcaagctccttggcttgttgttccttccactctttcaaaagtggaatcagaaacgccgggatctggtgtgaagtttccttgttggctttggttggcccgattttgccgctctttttgagggcttgaataatcaggacgtaaccggtgttgaagtcaatgtgtttccattgcaacccgtatgattcgcctttgcgatcaccaaggttcaacgtcatcagcaacagcaagtagtcttggaaggacagcttccggttctcgaagtcttctttggcagcatcgagccaagcaatcatttcatcagcagatagagacgagccggtcattttacgccgagtggcgagccgctccttcttcgggctgccgaccaatcgtagggctttttcgatacggttggcgtcgatgtagtccatgatctcggcgacctcgaagacttggcgaacgtaagccttgaccgtgcgaatgttcgcgtacttctcagccaagattgaaagttcttgaaccacgaactgcttgttcaggttcaagtagttcagtgaataatcaccgaacagcggtagcaagtgcaaccggaaaatgttttgggtgttgacctgggtttcctcggaaggaacgacccggatgcgcccactaccaccggcagtgtacagtggccaccaaacttcccggtagaaatccttgaacaggatctcgccgttagtttgaatggaacccgccgacgccttgcgctgtgcttctttgatcttgtcttcgactttcttctgcaatgccttcgcttccagcttggttgcgacggttttgcggtaacgcagcgtctttacgccgatgatgtcgcgaatgtctttggggtagaacacctccacaaaataagtgcctgcatcagttttagtaattgccatgatatttacctcctgttggttgtcaacgagcttgaacaggacgtaaagctacatcgacatattaccatccttcaacacgtttgcgaagccatgcatcgacggcatcgcgatcataacgaaccacaccgcagacgttgattcgtggtaggccaaggccaatccacttatctaaggtgttgttagaaatttttaagtagtcgcacagttccatcttcaacagataccgattgttggtggcgagttcgttacgcgctttgttgacctcatcgagaaacaaggtggctagcgcgttgcgaatcgcgatcacgttgcggtcatccattggaaaatcgagtgtggactgggatgctggtgcttcgataaaacatgcctcctttccggcagtcacgaacagactgatgcgaatacgacaggcggtcatcattcagcccggttccaaccggctattgagaacctcgctgtgagacgctctttctcccgtttcgtggcagtgacgtacaagtatccggcctactggggtaatcgctcgctcgtgtgaggttgtggcgttgtgaggcctgcgttgctaaatgatggtattcagttgtcaaaggacatcggcggtaatcaaaaacccgcttcgttatatacagacaacgaaagcgggtcgaaatgaaagggattggtgaaaattgtttatgtttttttctgaccgggattttgtgagggtagcgcaaggtgctgctcaacgttgaagcacttcgcaatgtagatcagtttgatttgaagctcttgtcttaaatctggatcgacgtgccgttgcccgtacttggcctcgtagtcaatatcacggccaaataattcaagcatgagggaaacagcgtcgtcgttgtcctcctgaaccgccaaaataaccggtactaggttatcgatctctgaataatgcattgaatactcctccgcatccattacatgtttgtgtatgctgcccgaattcgattcaaagcccgttgccggcgataattcaccccctggccagttttgccggaacggctaccgatttccacgtcgttcagctcgtcataatagtattgatacaacaccatcttatcaggtagagaaagggaagcaaccgccgtggcaagacgctcgttttcgatgaagtcctccaagtgttcgatttcctcatcggtcagtttgagttcgtcaagatggtgtggatcttcaatttcttcgatgagccattcttcgagtggtgtctctttgattcggcgaagattgactttgtggcgattgattcgttcgttcttgagcgcttgctgcacatagcggataaacatccgcgacacttcttgttcactactcatttgaatggcctcctaaaatcaactaatgtggttacatatagacagacaactttcggcacatgaaatgaaaggggattcaggaatttgttaaataatttcacttgtacttagtggctgttgaactaggccgccatatcttcgacccttgtagtaaatttatagcgaatttgataggcctcaccctcgaatttagccaaaattaaaattggtatagcaaatacccttaacagggtcagcacattgctcaagacgatggccgcgtcaatcttgacggccagtgattcagctgtccgagtgttcaccaagtcaagccccagcgtgcccttcataaaagcaaaccggcgttcaatggtacctcttcgattctcggcatcagtatcctcacgccgtttcgctgcatcaacgtgttttggatgccggccaagcttcggaccgcagattcggatacccaaatccttacacagctttaggttctcccgattacggtacagcgtatcggccagtacttcatccggataatgtccatgaaggtcgtaatagtggtctaaagtttccgcgaagtcttggccctcagagaatgcggtgaaatcaaaacgttcaatgtcgactacgccttcacttaacgaacagtcaatcttcgccccaaattcaactttagcattggccttaccacgttgaattgggcgaatgtacggctgttggagactaacaattcggtcttcaacgtggtgagtcttgtgggtatacatgtaccattgctggtcaaatagaattcgaatcacgcctaagcgaatcgcttgttcatctggtagagtcgcaccctgatcgatgaattcgttgatgtaccgcaaatcacggcgcacatattgaagttgggccttgacctgtttatgaaagccaccacgctgttgctttggatgtcgtgaaaatgaggtccaacaatgcttcgcctcgcgtttgtacatgcgtgggtttggcacaccaagttggtgtgccatatcgatcgccatcgcctcaagattcagccttgcttggttgaggaggacggtgtcttgaggatacttgattttgactggcactgcggttgcgtccgtgatgacggtgtccactttgaatgggaccaacgcttcgatcttggcgcgtactgtatcattcatgatattcgtaatcagctcggagatatcggcaattcgtttgcgaaagtgtgccaggctggaataattgaacggctcaaccgctttgtattcggacaacccgatgaaatattgaagtgcgggtgtatcacgaattgccgcaaccaccccacgatcagttaaacccatccgttgttggatcaggattgccccatagagtaaacgaaatggttttgccgcacgtcccgcatttttggtgaactccaattggtatgcctcatcgagagctttccagggcatgacctccgccaactggacccactcattgttagagctaagtggggtacttaaaccggcaccaaaggattcaaatgacaattgaagtgggctgtgacgatagaccatacgataacctccgagtaggttcccaaaaaatgcaaggaaaatgcaggaaaacagctaattccaatggatttattataccgcaataatgcatatattagcttaactgcctgaattatagaatttttaagcagccactatgtagtggacactgaatatttgtaagtgccttgttttaatgggaaccgttccgttactgtcgtataatgaatgcagaggaatttcctgtttttggcagtttcccttgcacttgtcatctcgtaacggaggatttatccatggtttatcggcatactgacgttcaactatctttcgaatcgtttgatcctggattattcacctcggtatttgggacatgaaatcgcatctggccggtctgaaagcaacgtttggagcgttgcgaatactgactgagcggagaagttggtgatcgatgcaccacgaacagaccgacccagttttcggctcgacgcacgacctattcagttattcagttcaggtcgccaactgatggacttcgtccatgagccgactaaaccagttcttgtaaacacacaacggctttttacgttacatatgattgagtaaaacagttaaggctgcaaatgcgacacttgcaattgcgactaaaatgaattgatgctgtttcattttgagaattgcaatgaattcacggatgattgcatttggtaagaagtaacgcgatgttttagcgccaatgccatctgctttcaaacgggcttgctttgcaaaaagcccagcgcggaatgtgtggtaattattggttgcaaaaataattttaggattcgttttagtggtatcagccatgataatgtcttttgaaaattgcatgttttgtaaagtgttgactgatttttcctcggtgagggtgtctttaatcggaatcccttgctcaatggcgtaacgttgcatggcaactgattcaggcagcttctcatccggaccttggccgccagaaaagaccagttttggtgcagggcggccttttttgacttgtttatcataaaatcgaatggcgcgattaatccgactggccagtaacggtgggacgaattgaccatcgattaaaccgctacccaagacgatgatgtaatcttgttgataacgggggcggttgaattgatagataatcagtgaggttagatataaatagaagaacaatggaatatacaaaagaaaaaccgatacaatcgtgctgacaaataatttaacatcggcgggaatgtgtaacaagcgcgtgatgattgggatgaaaaatgagccaatgatggctaacgcaatgaggagggtcagcatgttggataacgtgtgactttcttttttccagacaatatacgcgttccacagcaacaagacaataccgaataagtagaagaacatgacgattagaacgacaacaattgcagcagcaattgcaatgttattcagcgtttcgttattgaggcgaatcacaatgagcgcagcatccattaatgcgctgaagaggaaaaagttaaatacaatgccgttgattaattggcgtttttcaaatcgctgtaaaccaatgaataaaatcaaaaagaaaaggggtgacgcgtaaacgagatcaattaacgtagtcataataactccccttatgattaggcttggctttcaaaggcgtatgtttcaatggcgtatgccacgccatcttggccttcatggttactcttagtaacaaccttagcaatttttttcaattcaggaatggcattatccatggcaactgggaagccggcgtattctagcattgatagatcgttaccttgatcaccaatggccattacttcagattgatcaatatttaaggcatttgctaaatcacgcaaaccatttcctttaccggcgttcttgttgagtacttcgaggaagtaggcttcactttgaacaaattgataacgatcgaaaaaatcagcaggaatcttggttttggcttcagctaagacggcgggttcgtcgattaacatcacttttgaaaaggccttgttaggtgcgatttcatcgacatggcggaaacgaacaggcatgttgacgagggcactttcaccgactgtataaggactgatatcgcgattggcggtgtagatgaattgatcgtcttcagcgtgtaaatgagaaccaatttggcgggagagggtttcaagctcaagatattggtcacgcgcaagagtgtgacgcactagaatttcaccagttgctgtattttgaaccaaagcaccgttgaacgtaatcacatagtcagtggcttcagttaaacccagttcttttagaaaaggcgtgaccccggtgagtggtcgcccagtacatagcacaactttaacgctatgttttttagcagctttgacaactttgattgttttagggctaaggatgttattttcatttaatagggtgccgtccatatcgacagcgacaagtttgattgacattataaaaactcctttttagtggttaggattgattgcaccgttacgcaagtatgctttgaactggcggtatattggtgcgaagacttcgatatcattttcgttgagcatttctttagggaaatagaagcgttcatcgccgctaaaacggcctgagatggcggccaccaagtcacttaatgatgataactcttcaagttgaccatcagattgtataatttcaatctgagttttgggtgatttagcggagggatcataggcgtcatacggcaaatcgaaactgttattaacagcagtgtaatactcactgttataaccagcttgctcggttagcgcccgtaattctggtaaaacacgttgggtctgttggctaaaggcaaccgatttgagtgggcggcggcttaaaaagcggtcggccaaatcattgagcactgaatccggatagtctaaccagtatagaaaataggtattcaaaacgccatcatctaattttaaatagtcttgtaaggtgaagttctgttcgaaaaatggaatcaataattgcggtgcgagactctgatgatggtcaggctgttgataaagaaatttcgcacgttgcaagagcttttgcaagataacttccatgccgcgtgaaacaggatgaaaataaacttgttgatacatctggaaccgactgacgatgtaatcttcaacggcgtgcatcccgtttgctaaaaaggcaatgcccttatcgtaaggccgcatgactcgtaaaacacgcgtcaaatcgaattctccgtatttagtcccagtattgtaagcatcccgtaataagtaatccatgcgatcagcatcaatctggctggaaatcatctggacaacttgtggatttggataagaatgatcgattacactagcgactttcgcagggaaatcatccgcgacttgggttaagacgcgattaatggctgtctccgggttggtgataatttggcgcgtaatcaattcatgatcagtatcgaagatgtgttcgaaggtatgtgaataagcgccatggccgatgtcgtgcaataaagctgcacataaggcgactaaccgttcatcatcgttccaaagtccatcaccggcaacttgactagggtagttaagttgaaattgatcacagatttggcgtgtgatttcataaacacctaatgagtgggtgaagcgggaatgttcagcgccttggaaaacagaggaagtcgtgccaagctgtttaatccgccgaagacgttgaaattcgggggtgtcaattaaatcgagaatcacttgatactcgacgcgaatgtagttatgcacaggatcacggaatactttttcacgcgatagtttaatagcggtgttagtcacaatataatctcctttttgaggcccgttaaacttgataacggtggagtgctgtttgttttttaagtagtagttgttgataagctttcgtttgtaattgtggtgtgaggtcaactagttgtggttgttgaaccaaccggctaaaagcggtctgtaggtgcgtaatggctgttgcaacagtcattggttcgtttaacagatcagataggttggccatggtgtccgggatgaccgctgggaaagtccaccgcgtttggctttgtgcttggccagcagtgtaaaaactgtgcatgagtttgccacgcgcctgttgattgcctgtaatgctggcatataagagtacggcaattccgtttttggcacggcgttgggcaataccggcaaatttttgaccattgatgctgagatcgtattcgccagggcaataggagtgagtgacttcgaaatggtcaatcgtgacgggatagtctgcaaaggcagttgtgaacaattggtgcatgagcgcgtaagcagcattaatgcttaggtgatccgccatatcaggaagatagaagctgacgttcaaaacgccggcatccgtcacaatccccaagccaccagcgttacgcacgaaatgggcatagtgtgcagcctctaatgtggcaaccgcttgtggataagcaggtaactttgtatccatcatgcccaaaataacattgtcagcaagcgtccaaaaatgaataataggttgttgtaattcgcggctcaaagctaagaggctattagcatgagcaaaagcgagtggtccagccgctttttcaaaatgttgggttaaaatagcccattcttgattggcagataaagtcgctaaatcatccatggtaatcacctccgaaaattaaaaactcttcttaattatagcgtaaattctaggcgctgtctgcaatcggtacgctggtcaaagagaattggcggattattctggcgctcaaattttgaatggcttataatagaactacttaattaaaattaaaggaagttatttatggcaagtcaaagcggaattccggtcaaggtacaccttgaaacgcaaattcaacaagatgggcaacttgaaaaacacgttttcgatgaggatggtcaagttgtcaaaatgggagagtcactttacttacgttatctggaacacggtggtgaacaagccaccgcggtacggtttaaattggctgctgacggtcaaattcaattaacgcggggcacagaagaagacgagacgcaattgcggttgtactttaagcaaggtgaagacctcggatcaatttaccaaacaaaatatggcaacatgccagtgctcacaacgacaacccatttattatcgatggtgaaggaacaaccgttatcaggtgaaattacggttcattaccaacttgccatcaataatcaagccgtgggggattacaaattacgattgatttttacagcttaagctagtatgattaaggatagactgttgaaaggacgtgtactggttgaaattagacgtttttaaaggccaaaataaagaagaactatcaatgattgaagtcgcacatgcaattttagaagaaaaaggcgacacgattgcattcgctgacttaacgaatgaaattcaaaactatttaggcaaaagtgatgaagaagtgcgtgcacgcttatcacaattttatacggatttaaatgaagatggtagtttcatttctttaggcgaaaacgtttggggcctccgttcttggtacccatatgaatctgtcgatgaagaagttaaccatccagaagatgaagaagaccaaccaactaagaagaaacgtcgtaagaaggttaatgcattcttagcagatgttaccgacgatgacgatgtgattgattacagtgacgatgatccagaagacgaagacttagatgctgatgatgatgttgatttagcagctacagatgacgttgctggtgatgacttaactgaatacaaagctgacttacaaaacatcggtgacgatgacgatgatgaagacgacgatgccttagaagacggtatcgaaggtcaattatctgaatttagcgatgatgatgaagacgaagaagacgaagatgacgagctttaattagacgtttccgattcgttgccataaaaaaagacgccaaagttaactttggcgtcttttttttgcgtttaatatttttaagctaatcctcgtcggatacccgacttacgacacactctcgttcaagaaaatggtaaaccgcgccgattaagttggcgtcttggttgaagtgacaaatttcgatgtgtggcacaggaataggggtggttgcccctgcacggcgttgccagtaacgattaatactactattgtcatcggctaaaagtgcgtcaatcgcagcgtttaattttggtagtaggtcagttcgctgactaatgccaccaccgacaccaataatctcgggcgtgtaagcaacgtttaaaaagagcatgatttccgcaagggcagcatacatctgtgtgacttcttgggtggcaatcggatccccttgatcggcaagttcgaagacggttttgccatcgattgtattggggagtttaaaattacggagggagacagtcttgccaatttggacgggtgagacttttgaattgttgagtgttttaatggcatctgcgatgaatttttcgaagttatcgattttatcagcagtggttttgagaatggtcccattttcgataatggataagccaatcccagaaccaattattgtgaataaggcgctcagatgaccttgaccaatcccagctgtcatctcggcgagtgctgcactgtcggcatcattttggagagagacgggcagaccaaggcgcgttgcaaattcagtttgaaattcaccgaggtgcaaaaatggcacataactcatgccatggatgatgccagtctgttcatctggatcaccaggacaactcaccgcaattccagttaaatgaaagtcggtcgcaaattgatcacgtaattgttcaacttcggaatagaagcgattgcgtgttagcggtgtagggaattgcgcttggttaattagttggtgtttcgtccaaatcccatatttgacggcagaaccgccgatatctagagctagtaacgcgtcttgtagcatggtgggccatcctttcaaagtaggtcatgcaaatagtgtagcataggcgatttaaaatcggcgcagaaatgactaatttttttgcttgacgctaattgccatttcttgtattatattctttgggcgctttgcagttactttaattgcgaagccagaatcggttaacaggctccctgttcattttgaatagggagcttgtttttgtttttggttgtttcccaaaagcatgaatgtttagcgtaatgctaagaagaaaaggagaatatttatatgaccaaatatgtttttgtaacaggtggcgttgtttcttcacttggtaaaggaattgttgcggcttcacttggtcgtttgttaaagaatcgtggattaaaggtaacgattcaaaaatttgatccatacatcaacgtggatcccggtacaatgagtccttaccaacatggtgaagttttcgtaacagatgatggtactgaaactgatttagatcttggccattacgaacgttttatcgataataatttaaataaatattctaacgtgacgacaggtaaaatttattcagaagttttacgtaaagaacgtaaaggtgaataccttggcgcaactgttcaagtcattccacacatcacaaacatgattaaagaaaaaatcatgcgggctgctacaacgactgattcagatatcgtgattactgaaatcggtgggaccgttggtgatatcgaatccttaccattcttagaagcacttcgtcaaatgaaggcggatgttggcgcagaaaactgcatctacattcatacgacattggtcccttacttgaaggctgccggtgaaatgaagaccaaaccaacacaacacagtgttaaagaattacggagcatcgggattcaaccaaacgtcttggtttgtcggactgaaaaaccaattcctgatgacatgcggaacaagattgcccaattctgtgacgttgaaccagaagccgttgttgaatcacgcgatgctgaatcaatctacgatattccattgttattgaagaaccaaggcttagatgattttgtcttgaaccacttcaagatgacagcaccagaagctgacatgacagaatggattgatatgttacacacaatcaagaacctcgaaggcacgaagaagattgccttggttggtaaatatatcgaattgcaagatgcttacatttcagtgaacgaagcattacgtcatgccggttatgcttataacaccgatgttaaagtgacaccaatccaatcagaagatattacgaaagaaaatgttgctgaaacattagctggctttgatgggattatcgtccctggtggtttcggtgatcgtggtttagaagggatgatcctttcaattcaatatgcgcgtgaaaatgatgtaccatatcttggtatttgtttagggatgcaaatggcaagtattgaatttgcccgcaacgttgctgggattacagatgccacaactggtgaagtgcacccagaagcaaaacataaattaatcgacatcatgtcagatcaaaaagatcttgaaaacatgggtgggacacaacgtcttggcttgtatccatgtaaattaaaaccaggtacaaagactgctgctgcttatgataaccaaagtgttatccaacaacgtcaccgtcaccgttatgaattcaataacgaataccgtgaattgttgacagacaaagggctagtctttgccgggacttcacctgacaaccgcttagtcgaagtcattgaaattccagaaaacaaattcttcgtggcagctcaatatcacccagaattcctatcacgcccaaacaaaccagaaggcttgttcaaggcatttattggcgcaacaatgtagagtgctgactcgaacgggttggctttgaggattaacaagaaaataaggattatggcgttctttagccataatccttatttttaggttaaccggaaaaggcagttcgaggaagcacgtttcataaaagacgctactagtcagcacgacaaagtagcgtctttttgtataccgaaaaatagttgtgaaaatggagatgagccgttttgaaaagccttacatttttagacttcgatagcccaattgaatgcgatgattagcttttactaagtatgaaaattaaaaagtaaatgttatccctaaatgccttgtaatttatgtgctgattaattattattatacatgtatgactaattatcaacggcattgagtagattgaagccgttttccaattttaaaaaataaaactaaaaacttaaaaatatcaaaagcgccttctggtttaaaccacaggaaaagtgggaaactgaaggcggttcttttgttgcagagcgaacggggaaatctaaaaatgaaaaaaatgttaattcaaggtggcaatctcttatctggagaggtcacaattggcggtgcaaagaatagcacggttgcgattattcccgctgctattttggcggagtcgaaagtcgttttagactgtgtgccgcacattaaagacgtcaacagcctactatccattctagaagatatgtctgtctcatctacttttgttgatgacacggttgaaattgatccaacccacattatttcgacaccacttccaagcgggaagattcaaagtttacgcgcctcatattatttcatgggggctttattaggtcgttttggggaagcaatcgttgggttgccaggtggcgacgatattggtccacgaccaattgatcaacatattaaagggtttgaagcacttggtgcgacagtgactaataaccacggtgctatccaaattaaggcaccaaacggcttacacggtgctaaaatttatcttgatatggcatcagttggcgcaacgattaatttattattagccgctgtccgtgctgaaggacaaactgtcattgaaaatgcagcacgcgaacccgaaattgtggatatcgcgacattcttgaacaacatgggtgctaagatccgcggtgctgggactgacattatccgcattgatggggttgaacatctgtatgggcgcaatacacacaccattattcccgatcggattgaagcgggaacttatttaagtatggctgcagccatcggggatggcgtgaacgtcaagaacatcatcagtgaacacatggacgcttacctcgctaagttagaggaaatgggcgttaagatggatgttaaggaagatagtatcttcgtttatccatcacctaatttaaaaatggttcaaattaaaactatgccatatcctggatttgcaacggatttgcaacaaccactaacgccgctcttattaaaagcgcaaggtgaaggcattgtggttgataccctttatcctaaacgaacacgccacgtcccagaattaattcggatgggtgcagatatctcaatcgaaaatgatgtgattattttacatcatgccgacaagttacaaggtgccgaagtatccgccgatgaaattcggggcggtgcttgtttaatgatcgctggcttaatggccaatggtgtgacaacgattgataacgcaagtaatattttgcggggctatgaccgcgttgttgataaactaacgggtctgggcgcaatcgtcaaaatggttgaagaataagttaaccatctattgttttttgttagcattcatgctaatatttaatggttatgtaaacaaatatctctgacatagcaaatatctcagggcaagacttaagttgtgcatctgaattgatgcagataactttagcaaaaaggagcggaaaagacatgaaacaaggtattcatccagattatcacaaggtagtatttatggattcatcaactggcttcaagttcatctcaggttcaactgctaactcagctgaaactgttgaatgggaagacggtaacacatatccattaatccgtgttgaaatttcatcagattcacatccattctacacaggtaaacaaaagtttactcaagcagatggtcgtgtcgatcgtttcaacaaaaaatatggttttgcagacaagaacgctgccaaataattattttgaaaccggggaatttttccctggtttttttttgcctttttttccataaaaatagccaattgcaaacggcaatcagctatttaatcaacattttttgaattcgatgactagcgagacacgctagcaaaatgactgggaaaaattgaatcgggaaaagaaagagtaacaaagtagcagtgacgtacggttgcgccacgatcaccgtacaactgacagcgacaaccgtggcaaccaggaggccgggagtgtatggcaatacaacggcgagacttaaaccgattgccgcacttgcaaagatggctgggaaaattttaccgccccgccaaccaaaggcaaatagcagattagttagaacggtttttccaagtccgattaagagtaaataaatgaatgattgatctaaaccggatttggtaaaggtgaacaagtagtgttctccagaaaagagtaaataaggcgacaatagaccacaagcacccaagaacacaccagcagctatcattgcaagtaagaccggccgctgaatcgtatcaaagagccactggcaccattgttctatttttaagaatagattgccaaaaactcaaccgacaattaatgctaaaataagaagtggccaaactattaatgtccaatgaatgattggtgtgtgcagtgtaaatggactttctttggggaagagttggttgaccaaggcgaaaccaagaatcccagttgcggttgtgagaatgtataatagaacttgattgaagtgtgatttgaaatgatcgcgcaaggaggttgtctcaatcgcctcaccaacaccggctagcggtgcgtggaagatggccgctagcatggcaccaatccccatcgtcaaaaacgtttctttagtttaagtcgatcgcccaaccaagtgattaggccgccgacgttggtcgagagcgcggcttcagggccaaggctagcgccgcaggctaatacaactaaggcggcgataatgtttttaccgacttgctgttggtaggcaacggacccggtttgtttaaattcgctgagtgtttcatgcattgttttaggataaggcccccaataacgttgcattaagccgacgagtaatccgccaaatagaccaacaagcaacggataaaatggctggttgaaatgcgaataaccgacttgccaaattaagtgtgtactgaaattaatgagggctaaaaaggcggccgctatgccaccaatcaacaatcctaaaagtaagctatataaaacaaaaataattttaaactgcgtggttttagtggtaggtgatgacatagagcctcctagttaagggaattatttatgaactattatgcactacccacgctagtttgaccatagtcgaattgtgagggaaagaataatgaaaatcgatcgattacaagcatttagcgatggcgtttttgccattttattaacactattagtgttagactttaaagtgccggactatcaagcagggcatttgagtcaagcggtgattgcacagtggccaactttggctgcctatgtactatcctttttttatgtggggacattatggttgtttcatcacgattattttgcgaaaataaaacaaactaactggcagttaaacgtgatcaatctcagtattttatttgcagtgacactgattaattacccaactagtttgttgtcggaatcgattgctcaacaaaatggcgctgatattcgatttgcttttacatcgtatgcgattgttgcattagtcatctcagctttgttttgggtattatatcggtatatggcactgcatcatgaactaatgcgtcagtatgaacagcgacacgaggaattttatcaaacgattaaaaatgatcccttacgaagtgtcttgatttacgccattgccattgtcggaattcagattaatagctggctaggggcactgttgattttgctgggcaatatctttcatttcatcgcatacttgcgacttagtcggagtgtcacgctgtatcatttgaatggaaaggatgaataacatggcaaaacaaaaaacaaattggcggtgggtagattggctttatgtcttcaccattgtgagtcaattaatctatattggttattacttagaacaaatgctgactaaccccaaagacaacggaacattgtcttttgccgttttacaagtggttgcaggcctggtgattgcgaccttacctattatcattgaacgctttatgccataccggtttccagagattctatatgcagtttatttaatctttgtatactgttcgattttattggggacgggattacatttttatagtcgcttatactactgggataaattcttgcatgtcttgagtgccgggttattggcgggcttagggtatacggtctttaacgtattgatttcaaaacaactccgtcaaaccatttcagccttactcatgagtttgtttgcggcaacgtttgggagtacgattggtgtgttgtgggaattctatgaatttaccggcgatagtttgttaggcttaaacatgcaacgttatatggcaaaaggtcaccttttattaggccaagcagccttgttagacacgatgggggacttactagcggatgtcttgggatcatgtttaatcgccattatcggctatttctgtattaaacataaccgggactggttagataaactgatgtttaccaaaaaatagagtgcgtttgtggcgcttatattttgagcattaactggatttgacgaattggcgattgtaatcaccgatttggcaaattctgttaagcgcagaaatatgccacaaaaagcacgtttcaacaaaaaagtggtgtcgctctgaaaatgagcgacaccacttttttgtattatttttgtatttcatgttcttcgcgtaagacttttgtattctgacgcacccagaagaggttgacgattactaaaacggttgtcgataggaaaaccccgctgtaaccgaataggccagaaacgctggaaccaattaaaggtccggcgacattccccattgcttggaaggattggttataactgaaaatccgtccggcggaactatggggtgagtacttcgcaagaatcgtttgaacttgcggtaacaatgcggcatcggcgaccccaaccagcagacgcagggcaccgagttgccaaacattttgaacgaaagcttgcggaacgtaaacgaagacggcgaagatcaagccaccgagtaaaattttctcggaaccgatccgatcgccaagtgcaccaaaacgcggcgcggcaattaaggttgcgatccctggagtagccgcgacaactccgctgactaacgctacgttattgccatgatgcattaattgacggacatataaactcaacagcgggctaattgagttgttggaggcttgaataatcattgtggtgacgaacatgccgataattaaatgcgggtatttcaattcatgaatcagttgccgaccgggtacttgatcgcctttttctactggcgtgaagtcttcgtgaacgaaaaccagacagaggataaagacgatgaacaagatggtaccggtaatgaagaaggttgttcgatagccggttgcttgggcgataatcccacccaacaacgggcctaataaggttccggaaacacttccggtggtcagggtgcctaaagcttgaccacttttttcttgtggtgctgaagtggcaattaaggcgtttgaattactgatataacccgagaagaagccttgtaatagtcgcaaaccaattaattcataaatattttggactaagcccatcgcacccaggacaatcgctagtcctaatgaggcgcggagtaacattaatttgcgaccacggcggtcagcaattttgccccaccatggtgaaatcagagcggtaaccaagaaggtaatagaataggtcaccccactccataaactcagttgggccgttgtaaagttgccaagtgtgtcaatgtataacgacataaatggcataatcaaactaaaagcaaccccggccatgaaattaccaaaccataaaacgacgaggttctgttcccattgtgcgcggcgtctgaataaacgttgacgaatgttagtcaacatggtgtcatcatctcgattctaaaaagttaaagcggcgaccacgcttgctgatgtgcgtggtaggcgtcttttaagtgtgggagttgttcaaagagggcagtcagttgcgcatctttagctcgtggcagctggcgtttaaagtacaaccgctgagtgtcgtaggcagtcaatgcgcttgcttgttgggctggtgtaccgtgttcggcaaaatagagtagccaatcaaacagccattctttatcagcatcggattcataacgggctagcaaagtgtctagctgtgctccctgtgccactaacaagtaatggttacgctgcaaaggggttaactcattatctggatttagatcaattactttgggacctaattgttcgagaaaactatccagcgaatcagcaacggttaaccattgatcgacctcagtatctatgtagcgaatcggtggttcagctgaggcttgttggcaatcaaatacaaagtactgctgttgatgctgactaaaagggactaagtaatcgggcaagtcgggggcttggatgactgcttcaccgttgtgagcaatcccagctaaataatgacactcaacgtcggcgagaccatcacttgttggctcactcgtaggaaggctaaagttagtcaaaaaaccgccattggttgtttgacaaagtgcctgataactcatgggaatccgagggtcatcgacaatcatccgtggtgcagttaaatcaacattcgcaattgctggctgtgcagtaaacatgcaagtatccctcccaaaattggtaactctttaattttaccatttatgtcaaaccaaggttttgttaaggttggcaacctattctttatttgttgtagcgagtctgataatatgaagacaacattaaagaaaagaggatacgcgtatgttgtggtttattattatcattattttgttagtggttggcgcggttggcttctatatcagcacctacaataacatggtcaagagtcggaactggacagatgaagcatggagccaaatcgatgtacaactcaaacggcggaatgacttgattccaaacttagtatcgaccgtgaaaggttatgctaagcatgaacaagacacgttggaaaaagtcatcaagatgcggaatcaattggttgaaatgccagctgataatcggcaagcaacaatggcggcttctaatcaattaacggattcattgaaaagcgttttcgccttgtcagaaagctatccagatttaaaagcggacgcagaatttacgaagttaatggaagaattgacgaatacggaaaataaaattgcgtatgcacgtcaattgtttaactcaagtgctacccgttacaacaaccaaattcaaactttccctggtaatattttggcaggtgctcacaatttccaaaagacagcttacttagaaacgccagttgaggaaaaagcagcacctaaagtttcctttgaatagggtgtgattgggaatgttatttgaacaaattcaacagaacaaacgtaaaacggtatatgtgatgattggcttttttgctttagtattggcaattggggctgcattagggtatctgtttatgcgtaatttgattagtggtgtcgtggtggcggctattttagccgccgtttatatggcgatgatgattggaaactcaaccaacgttgttatgcagatgaatcatgcgaccgaagtccatgatgctagcgaatatcctgatttatggcacattgttgaagacatggcgatggtcgcccaagtaccgataccccgggttttcattgttgacgatcctagcccaaacgcgtttgcaacaggcaatgatccacaacacgctgcggtggcggtcacgactggcatcatggcgcgtttgaatcgggaggaactcgagggggtaattgctcacgaagtctcccatattcgcaattacgatattcggttacaaacgattgccttggcactttctgcggtgatttcaatgctcgtgaacatcggcagcaacatgttatggtggggcggcggccgcagtcgtgataacgaccgtgaagaaggtgcaagtaatatcatcggtttggttttttcgatcctattgttgatattgggacctttggcggctagtattgcacagatggcgttgtcgcgaaatcgggaatacttggctgatgcatctggtgtcgaattaacgcggaacccacaaggtttgatcaatgcgttattaaagatttctgacagtgagccaatgcaagctgcggatccatcaagcgcagctttgtatatctcagatccatttaaaggacttagtcggtcgggtactcatttatttgatagtcatccaccgattgaagaacgagtcgctaaattaagagcgatgtaatgttttaaagacataacgcatcagctgtaggtaatagttgatagaacacgttttatatagagggaggcaaaattcatttttgtccctctctttttttgtataataaaggaaaagaggagtgatcagtgtgcgattatccccaatccagcagttaatggcgttacaatctactctaataatgcaattgaatgagacaccgagcaaacagattaccatgattgatttaccggttgtgcgtgggcaattattattggcattgcatgcgcgtcaccagctaacattatcgacgcaacaacgcacaatgattcaacgcgccatcatcacaacgctggcaactaaaacggatggcactcaattaatggatctttggcggcaaacactaccgcagcggtatcggattgttgatcaggcagaggtggtggcccattttgaacagttagaacgcgctaattgggacgttgcgagtttacgcgcttatgcaacccatttaacgggacaacttgctgcgcaaccaacagcgcttaaaaggattttgcaacacaattggcaagcattacatcaagtaggctcagcactttatcaaatgctttttgaagcatacggggaccgaactgcacaaccagtaattaattaccagcggatcaatttagtgctcacgcatttaggggcgcagttggatgagcatgcgtttttgcaattaacagcacgtgattatcaacttgacccgcaattagcaccagatgcgccttttttagcaacctttgcgcaaagtgtgcaacgtgcatttgtcggtcgagttttaaccgataaacggattcatcaattcagaatgtatttagatcggcagaatctacgctatattcgccattattttcaacactctggtgaaacagatgaacaagccttagcgcggtttgtgcgaaaacgacaagcgacccagccacattattggctgcggcgtgaaccagctcggctccataataaataccgcaacggacagcgcccaacaacgcattggaatcgaaaacgactcacgccggattttcatagtgaatttattctagcaccatctggagcatttatcagtcaatggcaagtgcttaaagtaaaggcggatggtctgattgatagtaatcctgaccattaccagctagatgatggcacactccggcaactactaaacggtgaatcgtttaattatgctaatcggaatgatcggcaacacgcccggttagatagccaaccaccgctgcaaaatgatcatgcactacgcaaaacagcttttaaagggtggcggagtccgactaagcaacaatatcgaccaaatgataaacaggttgatgactattcacggtggtactcttaattggtggtcaatcatttttggggcttttttgaaactatggtacaatattgcgtagtattttaagccataactaaaaaaagcgtgcgtaaaaatgcacacagagtaataggagttattgagatatgaaaatgcagttgggtgaaattgcacgagtcactggggctaaaaacgatattgaacaatgggcaaccattgaagtgacgaatgttgcgtttgacgcacgtcaattaaatgcgggcgctttgtttgtaccgttagctggtatgcgtgatggtcacgactttgttggacaagctaaggaaaatggggcagtggcaactttttgggctgccaatcatgatgcacagccaactgattttcctgtattagtggttacagacccactagcggcttatcagaagttagccatgcattatctccaaaaaattaatcccaaagtggttgcgattaccggtagtaatggtaaaacaacgacgaaagatatgacagctgctgttttaggtagtcagtacaatatgcacaagacacaagctaactttaataatgaaattggtgtgccacaaacgattttatcgatggaagctaatactgaaattttagtgattgagatggggatggatcgcccaggtcaattaaaagcgctcagtgaattagccatgccagatgtcgcagtcattacgatgatcggggaagcccatatcgaatttttcaagacgcgtgataagattgccgatgctaagatggaaatcacagatgggctcaaagaagatggtctattaatttacgctggcgacgaaccgctattgactgaacgggttggcgaactcacaaccgagacattcggtaatttgacgaccaatgacttatatcccttacaagtccgtgcaggtgaaactgaaacgtcattcaagttgaatgcttggccagagatgacgtttacgattccaatgatgggtgcttataatgtcaataatgcgttggccgcaattttggttgggcaacggttccatattaaaccagaattaatgaaaaaagccttggcgaattttgaagtcacaagtaatcggacagagtggcttgttggtcaaaagggtgaacggatgttgagtgatgtttacaattcaaacccaacggctgccaaagaagttttacacaatttcagccattttgagactgacgggcggcggattgccgtcttaggcgacatgttggaacttggtactgccagcaagaaattacacgaaagtttggcccaagaattagatcccacgatgattcaagaggtcttcttgttcggggatgaaattgaaccattatatgtgacgttaaaagagcgttatgcaccagaacgcctccattactttaaccgccatgaacaaacgcaattaattgctggcttgcaagcgcaggtacaacctgacgatttaatcgttttaaaggcaagtcatggcttacatttagaaaaagtagtcgctgctttacaagatactgaagttaattaatgattagcaattgacagacaactgcacaggcacgctgtttagcgattgaagctatggaattagattaacaattggagcaattccgtttgctaattaagttgtggcatgataagctattaaggagcttttttaatgaaaaaggcttttgaaaacaattatattacaagacagatttttgaaaatggtgcaattgacgaagtggacctgttttgtaatggcatgttttttacaaaacaaggaggaacactatttgaaattcgcagaattaggtttatcagaaccaattatgaaagccatcgaacgcgctggctttgaagaagcaacacccatccaaggcgaaacaatcccattggcattagctggtaaggatgttatcggtcaagcacaaactggtaccggtaagacagccgcttttggtttaccaatcttacaaaacttagacttagacaatcctaacattcaagcattgatcatttcaccaacgcgtgaattagcaatccaaacacaagaagaactttatcgcttaggtcgcgaccgtaaagcgaaagtgcaagttgtatacggtggggctgacattcgtcgccaaatccgctcattaaaagatcacccacaaattcttgttgggacacctggtcgtttattggatcatatcaaccgtcgcacagttaaattagaccacgtgaaaacattggtcttagatgaagctgacgaaatgttagacatgggcttcgttgatgatatcgaaagcatcatcaaacaagtgccagaccaacgtcaaacacttttattctcagcaacattaccagcaccaatcatgaaaatcggtaagagcttcatgactaaccctgaaatgatcaaagtgaagtcaaaagaattaacggctgacttaattgatcaatactatgtgcgggcaaaggacttcgaaaaattcgacattatgacgcgtttattcgatgttcaatcacctgaattaacattaatctttggtcggacaaaacggcgtgttgatgaattaacacgcggtttgaaggctcgtggttacaatgctgaagggattcacggtgatttatcacaacaaaaacggatgagcgtcttgaaatcatttaaggctggccgtttagatatcttagtggcaacagacgttgctgctcgtggtcttgatatctcaggtgtgacccatgtttataactacgatattcctcaagatcctgatagttatgttcaccggattggccggacaggtcgtgccggtaagtcaggcgtttcagttacttttgtaacaccaaacgaaatggaatacttacacatcatcgaaaacttaacgaagaaacggatgttaccattacaaccacctacagaaaaagaagccttcaagggccaattagctgcagcggttgcagacatcaactcaatgattgaaaaaggccaattggctaaattcagcgaagaagctgaagaattattgaaacaattctctgacgttgaattagcttcagtgcttttgaagacaatcagcaaggaatcagttcctgttaagataacaccagaacgtccattgccttcacgtaaaaaaggtggcaatcgtagcggcaaccggaatggcggcggcaatcgtcgtggcggtaacggtggcggctatcgcggtggcaatcgtcgtggtaatggcgatggcaaacgtcgtggtaatgacaacaaagacggtcgtcgcaacagtggcaacggcgatagcagcaaacgtcgtagcaatgacaatcgtgacaaccgtaagaagactgatggccgttcaaaacggaacttcacaattcgtacaaacgataaataagactttttaaaaacagcgggcggccaacttggtcggccgctgttttcatatagtcaattgtgacagagatgtaagttcagtctctgtcttttttgtggtaaactaattaaaaatagggtactaggggcgaagacgatgattgctggattaggcattgatttagccgaaattgatcgatttgaaaaagcacagagtaagaatagtcattttgctgaaaaagtattaacagctaaggaatatgaactgtttaaacggtatacggggcgccgtgcgttagaatttttagcggggcgctttgcagtgaaggaagcttttagtaaagcttatgggactggtattggacaggtacaactgcaagcgattgaaacgttaaatgatgcaaagggcaaaccctacatcaaacaagatttatttgagggaactgtccacgtatcactttcgcatacaacgacgttagtgatggcagaagttattttggaaagaggttgagacgatgacagtcggctacttacgaccaacacgcattctagttgatcaaaacgcaatttatgaaaatattcaaaatgaactaaaggatttaaaaggcacagatgcagtgattttccctgtcttaaaagcaaatgcttatgggcatggcatgattcctgttgcagaagcggcccaagcggctggtgctgcaggattttgtgtggctattttagatgaggccttagctttacggcgtgctaactttacggaacccattttggtgctagggattacacagcccaccgaaatcgaattggtgattgccaaccaaatctccattacggtcggctcactcgaatggttgcaagctgcttacgaaattgcccaacaaataccttatccacaaccaatgcacattcatttgagtgtggatagtggtatggggcgaattggttttagaaatgcgactgaattactagcagcagccacatttatcaaagcacatgcgaaatattttgatttagaagggatttttacccatttcgcaactgcggatgatcccgatgatacttattttaaagaacaaagtgcccggtttaatgaactagtagccgtgttaccagaatgtccacgatttgtgcatgtttcgaattcagccacgagtttatggcactcagcttgcaatgagaatttaattcgaatgggaattagtatgtacggattgaatccttcagggaatgcgattcctgaattgccttatgcattgaaaccggcgctaagtcttgaatcagaattggtctttgttaagcaagttgaagccggaagtaagattggttacggtgcgacttatgaagcgagtgaatctgaatggattgggacgattccaatcggttacgccgatggttggtctagacggatgcaaggctcaaccgttttggtggatggacatcggtgtgaaattgtcggtcgggtctgcatggatcaattgatgattcggttacctaagcaatatccagtggggaccaaagtagtttttgttggtaaaagtggtgatgacgaaattactttacaagagatcgcagattatgcagggacgattcactatgaaattatctgtggtttatctgatcggttaccacgggtttacagtggaattgatgaacattaaggattaagaatttgattatcgccagttctgtggtaggatgaataaaggttaaagtgttgattcggaggttgatgtagatgaaagctaaccgtgaacaactatccgttaaattagacgttgagttggtccaagcaattaagcagtattgtgaggtgtatgcccttgatgagagtgatttgattcaagatgcgcttcacgaattcatggcgaccagacagtcaaaagtagataacgtcattaacgggtacgctgagatggctagcatcaacagtcaaattgcggctgaatttaacgcttgcgaaagtgaggcgtacgcacacattcgcgtagttgattgatcctaattggagggagaacaagtgggagaattaatacagcgtggcgatattttttatgcggatttatcaccagtggtcggttcagaacaagggggcatgcgtcctgttttaatcattcaaaatgatgtgggtaatcaccatagtccaaccgtaatcgttgccgcgattacagcaaagattcaaaaaccgaaattaccaacacacgttgggattacggccaaggataatggtgtcgaacgcgactccgtgattttattagaacaggtacgaacgattgataaacaacgcttgaaagatcgcgtcacacatttagtggcggataagatggcacaagtcgatcgggcgctcaccattagtgttggacttaaagcggtcttaaatccttaatacataaataccaaaaagaaagaatgaagagaacccgcttataaaagcgggttctcttttttttgacctttatcaacagccggtaaatatgatatgatggtagctgttcgaaaaaacgtggttcgtaaccatcccacgcaaaaaaactaggaggattcaaagatgacgaatcaaagtcgattaaaaacggtgattctaaacgggttagtggcagcattatacgttgttttatcgttattcccaggtatgttgggatttgcttcaggagccattcaatttagaatttcggaaggcttaaaccatttagtggtcttcaataagaaatatctatggggtgttttcggtggggtattagtgttcaatttctttttcagttctgaaaacaagttactcgatacgctttttggtggcgggcaaactttattggcgctgcttgtattaacgcttgtgatgccctatttaaaacaaacttggcaaaaaatggtggtcaatattctcttgttcaccgtttcgatgtgtatgattgcgtggatgattgtgttaaccggttctactgctagcacacacattccattctggccaacgtatatttcgttggcactttcagaagcagtcatcatggtgattaccgcaccagtaatgtatgctgtggataaagttgtgcactttgatgcacaaatgaaatcataaagattaaaaagggcagtcctaattaggactgcccttttttgcattaaactaaatcatcaagtttggagtcatcacggagcgccttatcagattgtaaatcatcgatttcaggaacacgatagccttttttctcgagcttataaacaatctttttcaaaatctcaagatcaagtccagcaggcaaggtgaaaagggtgcgtcgtacgaattcatcttgcttagcatctaaggtgatgcagctggcgattgaggtatatttagcgataatcttcgacatggcaaccaaatcaccttgttcaccagaagaaagcacagtgagtacatagctacttaattcgagattccacgcttcagaaagcatatttaataacgtgctatgcgtgagaattccgtaaaaattgctatcttcgtctaatacggcgatgtatggcaaatctttaatgttgaagaatactttgaaaaacggtgcgtcaactggaatatacttggtcatattcttcaataaactggtcacgggaagctgcatatcgcccccttgagacttatgacggtagatgtgcatcttatagatgttaccgcggaaaatcttgccgctagcatctaggacgggcacacaacggtaaccagactcttctagtagctgtaatgcttcttctaaggtcaccgattcaacaattgtggtgagacgttctttaggtaaaactagggatttaatgagcataggctttctccttagattaaaattctctcatatactaatgtaatcatatcataccaccaagcagattaaaataactagtttttcgactcagcgaaaacttgattagtaatcgatgagaaagaacgtgaaatctaagcaataaaaaagcagggataaaagttaattttatccctgctttttatttaatcgttgagcttactttttctaaacgaattctgtaggtcagctacctctggttaatccgtagaggagaggtgttgctagtacactacgtctaaatcactacaactggaatgccttcgctaacagtatcgtagagtttagccattgtgccaggtggggtattgatacagccgtgtgagccgtgttctttataccagtcaccaccgtacttaggttgccatggcgaatcatgaatcccaacgccagtttcattgattggcatccagtaattaactgggcttgcgtattcgctgaccccatcaaagttcttccccttcaatgtggcattgcgttctttcttccaaacgctccaaacaccggttggggtgacttgtggtggacgtgctgaaacgatatcagtgtcaattgtgaccttaccatcttgatagagccacatatgttgggcttttaaatcaatttcgatgtaggttgaaccgacactacgcgttttctgatcagttccggaaccacggataacagctgttcttgagaaatctttgcccttaggcacttctgtcattaaggcgttgatttcatcggcaggagagatactccacccataaatcccggctgggacagtgactgtgccttcttttgtagaattgaaggtcaaatctttgtcaaaagtatcatactttgcttttaattgataaacgtatttggtaagggcagctttatctagactaatggtaccgttgttatacgttaaccaactttggatgtcttctttaggaacttggaaatcattaccattaactgaatagctgattttttcattagcaatcgtcttcaattgatcggcagtttttttcaattgcttgtctgtagatttcacttcaggttgcgcataatcgttttttaagtcgattgttgcttgaccttggttaatgccgtgggcaactgcttttttgaacttagcggcatcaattgtgttcccgtagacttcttttacgagatcgaattgatgattctcgaggttaatatgggcattctctgaaggtttgcgattagcgttgaccttttcgagggtttccgttgagaatttgtcaaaatcagcggcatttaaaatgagtgcgtcttctgatttagttgtttgttcactggcaaaaacgtggcctagccaagaccaaccgttttggctttttttaatcttttccaataacggtttaaaattatggctaaagccagcttcttgaccgctaaaagttagcaatgtttgattgttatcctttagcgtatatttttgacgattcactttttttaagagttctgtgttagcgtctgcgactgatcggccactaatgttgacaccggcaacggtcgtatgtggcaagaatgctttttgataatgaagactgactgccgagtaacctccaacaaggataacggctgctacgccaagggcgacgtaggctttcttcgtaagtttcacaacctcaactccaatctctgcataggttaatcataccccagtatcacataaaatacaaaggcgttaactaatagttagcatacaagatatgcacccaaaaagaaataaaaaagtattatttttaataaaaaatatgtagttgataatattaacaccataaaaaaacgactctcattaaatgagagtcgtttgaccaacagcaaagagcttattggcgagtttcgatatctaattcagcaaatgcttttgtaacgatatcttttaattgttttgcagaactgtgcatgctttccatttcgtggtctgtcaatggaatttcaaggatgcttgtgatacctgagcggttaataacagcaggtgaaccgataaagatatcgttcaagccgtattggccttccatgtatacagataatggtaagacagcattttcgtcgtctaagatagccttagtaatacgagctaatgcagtaccgataccgtagaatgtagcaccttttaagttaatgattgtgtaagcagcgtcacgaacactttcgaagatcttaacaagttcttcttctttaatttctggatgagctttaacccattcagaaatcttgataccaccgatgttagcgtgtgaccatacagggaattctgtatcaccatgttcacccatgatataagcatggaccgaacgtgcgtcaacgttaaccatttcagcgatgtctttacggaaacgagctgagtcaagtgatgtacctgaaccgataacgcgttctttagggaaacctgataatttccatgtagcgtatgtcaagatatcaactgggttagcagcaactaagaagataccgttaaagccagattcaacgattgggtcaacgattgtcttcaagattttaaggtttttacttactaagtctaaacgtgtttcacctggtttttgtggtgcgccagctgtgataacaacaacgtcagcatcttttgcatctgagtattcagcagcatagattttcttaggagaagtgaaagctaatgcatcagataaatcgattgcatcaccttgtgttttttctttaaagatatctacgataccaacttcttgtgcaataccttgtaaagttaatgcataagcgtaactagaacctacagcgccgtcgccgacgaggataactttttggtgatctttttcaatgtttgccaatataatgacgtcctttctgtaaatcaattcttcatttcgaaaaccagtatagcataatttacaccaaagttcgcgatttttggttaaattttcagaaaactatttctttcacaaagagagaaataaactgaatatggtataatggttcttaatatcaactggcgactggggagaattaactgctcagaatttttgcgtgatagcgccagtcaaaaagaggacgttaataatgaaaatgattgttggcttgggaaacccaggcagtaagtatgcaaagacaaaacacaacattggttttatggtgattgatcaattatgcgaacggtttaatgtgaccttaaacaagcatgattttgaagctgaatacgggagctttaaatatgaaggggaaacgattttcttagtgaaaccactaacgtttatgaatgattccggtcgttcagtcgggcctttaatgaaatactaccaagttaacctagatgaattagtagttatccaagatgatatggacttaacgctaggcaagttgcgcttacggcaaaaaggttcagcgggaggccacaacggcattaagagtatcatcgcaagtgtccaaagctcagaatttaagcgtgtcaaagttgggattcaacatccacaaaaaagtacagtcgttaactgggtcttaacgccgtttgacaaagacagcgcaccaattatcaatcaagcactagaccaggcatgcgaagcactagaagactggtgccaaaacgacgacttcatgaaaacgatgaataagtttaattagagtgtcgttggcagttggtcagattctgagcatttgcctaacttggcgaattgacgctgcaagcggcgatttgaaaagtgtagcaaagcgcaggaatctactgccaatgacacgtttcaaaaacagagtgcgtttggttgcggttagcaacagagcattaataaaaatttcaaataatcgaggttttaggattatttgaaattttagattaagcggaagttgttgcaaccaaaaagtacgtttcaaaaaacagagcacgtttcttcgcgccattataataagaaagtaaaggaacttttacatggatttaatgacaatgctggggcagaccaaacaggtgcaatccgttttaaagaatcaacgaccagggattaaacaactacttacagggctttcgggatcagcgaaaaccctgtttttggcgacgatttataaacaacaacccttattgattattgagagtaatacgttccaagccaatcaagttgctgatgatttgagtaatttactcaatagtgatcagatttacactttcccagttgaagaagtgatggcggctgaaatggcagttagttcacctgagtccagagcggaacgtgtgcgaacgttgagttttttagcaacaggcaaaaaaggaattgtgattacatcggtcgcgggcatgcggcggttattacctacagcgcgtcagtggcaagatagtcaactcacaatcaataccgatagtgaagttgatccccaggcacttgctgcgcaacttggtgaaatgggttatttccgagataagttggttggtaaacctggtgagttcgcaatgcggggggatattattgacatttttccactggatgcggaaaatccggtccggattgaactctttgatactgaagtggattcactgcgttcttttgaagcagatacgcaacggagtattgagaatttagatagtgttcaaattatgccggcgactgacttattggccaacacagcacaattggaaatggctggtgaggcattacaagcagcttatgaggcggttgcggccaaaataacggataaaactgaacaaaaacaattggcgacaaactttgaaacaccgattgaacggttgttggccggtgaacgcgttgagaatttagcgttgtttgttgattatctgtatccagatcaatcaagtctgattgattactttaaaaagagtggcttagtgatttttgatgactatccgcgcattttagaaacgcagcggattttgactgaagaagcggccaactggcaaaccgatatgttggaaacccaccgcatgttgccagaccaacgactcatgatggatgcccaagcgctcatcaaaaaagatacacatgcgcatctctatctatcactgttccaaaagggaatggggaagttaaaactcgatgcactcaacaatttacccacgcggacggtgcaacaattctttagccaaatgccgcttttgaaaaccgagattgcgcattggcaaaagcaaaaacaaacggtcattgtgctcgtgtctgatcctaaacgggtcaagaagattgatcagacgttccacgactttgaaattgatgccgtcatcgccaataagactcagttggagacggggcggacacaaatcattcaagggtcacttcaaaatggctttgaattaccggatttaaaactggtggtcttaactgaaaaggaactgttcaatacggcgccgaagaaaaaagtccggcggcaaaccttggccaatgcagaacggttaaagagttataacgaattaaaaccaggtgattacgtggtccacgtcaatcatgggattggcgaatacgtcggcatggaaaccttggaagtcgatggggttcatcaagactacatcaccatcttgtatcgggataatgggaagttatttatcccagtcactcaactcaatatggtgcaaaaatacgtctctgccgaggccaaaacaccgaagattaataagcttggcggtggcgagtggcaaaagactaagagtaaagtttcggcaaagattgaagatatcgccgatgatttaatcgaactttatgcgcaacgggaggctgaaaagggatttgcctttccaaaagatgatcaattacaggctgaatttgaaggccagttcccctatcctgaaacagatgatcaattacgcagtaccgctgaaatcaagcatgatatggaacgcgtccgtccaatggatcgattattagtcggcgacgttggctttgggaaaacggaagtcgctttgcgggcggcttttaaggctgttgaagccggtaaacaggtggcctttttagtgccaacaacgattctggcgcaacaacattatgaaaacatgctgacacgcttcgcggattttgcggtcgaaattggtttactgtcacggtttaaaacgcgcaaagaagtgacggcaacgctcaaaggcttagcagagggcaaagtcgacatcgtgattggcacccaccgcttgttatcgcaagacatcaagtttaaagatcttggcttgttgattgtcgatgaagagcaacgctttggtgtaaaacacaaagaacgacttaagcagttgaaggcacaagttgacgtgttaacgttgacggcaacgccgattccacggacgttacacatgtcgatgctcggtgtgcgtgatttatctgtgattgaaacgccaccgactaaccgctatcctatccaaacgtatgtcatggaacaaaatgccggtgcgatgcgtgaagcgattgaacgggaattagaacggaatggtcaagtgttttacctccataatcgagtgagtgacattgaacgcacggtcgatgagattcaagcgctggttcctgaagcaacggttgggttcgcacatggtcagatgaccgaggcacaactagaaggtgtcatctacgactttgtccaaggtaaatacgacgtcttggtgacaaccacgattattgaaaccggggttgacatgcctaacgtcaatacgatgattgttgaagatgctgatcattacggtctttcacagctctatcaattacgcggccggattggacgtagtagccggattgcttacggttactttatgtataaacccgataaggttttaacggaagttagtgagaaacgacttcaggccatcaaggactttaccgaattagggtccgggtttaaaattgcgatgcgtgatttatcgattcggggagctggtaatttattaggtaagcaacaacatggttttatcgattctgttgggtttgacctatactcgcaaatgttgggtgaggccgtcgctaagaaacaagggaagcaagtcgttgctaaaacgaatgccgaaattgatcttaaactggaagcttacttaccagacgcgtatattaatgatcaacgccaaaaaattgaaatttataaacggattcgccagatggattcagaagcggcctttgatgaaattcaggccgatttaattgaccggttcggtgattatccagatcaagtcgctaatttattagcgattggtcagttgaagatgaatgcagatgacgcgttaatcgaaaccatcaaacaaacgaaagaaatcattcaagtcaccttatcggcgaagggcagtcgccttgtttcaggtgaacaaatttttgaagcgttatcgacaacccgcttgaaagcaacggtcgggtttgaacaagaacaattaagcgtgaaactcgtcatccagccgaagatgcaaccggcagattggttgagtgaagtggcaacttttgttacaagtctcttgaagatagaacaaaagcacacggaacaaccaacggattaggcacgctaagtggaggccaggcatgcaaaataaacagatgcaacatctgatgaaaggcgcggtcattttatcaattgcgtcgtttatcgcgaaggtattaagtgccgtttatcggattccatttcaaaatatggtcggtaacaccggcttttacgtgtatcaacaagtctatccaatctatggcattggcatgacgtttgcacttagtggctttccagtttatatttcgaaactggttgctgaacaagtcaatccggaggaacaaacgcagctgttaagacgctcatttgcactgttaggcatctttggtgctgcaatcttcatttatttacagtatcaagcgccgaaaattgcgggggcgatggcggatccagcattaacaccgctgattgaaatggtatcgtttatgtttttattgatgccgtttctagcggtgacgcgggggtacttccaaggaattttcaatatggtaccgacggcggtttcacaagttgctgagcaactcgtgcgggtcgtggtcatcttggcggcagcgtggctatctttgaaactgcactggtcagtgtatgaaatgggcacatgggcgatatcaggcgccttctttggcggcttggttgcaacctatattttattacggccagcagaaaccgcctttcaactcaaggcgccacaccgtggtggcatcgattttaaggcgtatcaacaattggcaaaacgcttagcgattgaaggcgggtcaatttgcctctttgcttcattaattgtgttattacagctggttgattccttcacagttaaaaaagggttggtcctcagtggattatcggaagaacttgctaagaatatgaaggggatttttgaccgtgggcaaccacttgtccagctgggattagtcgtgtcacttgccttctcatcaacgttgattccgagtctgtcacaagcgcggcaacggcggcaacaatatcaatttcaacaagttgctgaagcgctgattcatatcagtttaggtttatcggcagcagcaaccaccggcctaatggttttgatgccgcagattaattatttcttattcggggatgctgatggtaatcaggcattggtttggtatatgttgagtatcgcaatcatcgcgctgatcaatgcttgcaactcggtgctccaaagtcttgatcagttccataaaacaacggcagccttaattgttgggttaatcgttaaagtagcaatcaatcaatggcttgtgcaacactatcaaattgttggcgcgagtgtcgggactgttatcagcctcggtgttgtgttagccttaattttacggcaatcaccagtgattgtacggcaagcgcttggtttgcaacgctttaccggtaagttacttgcgatttgtgcagtgatgtggctgggtgttaagattgcgctacagtttgcaccacaatcacttagttccagaggacatgcgattttagggacgggccttggcgtactcgttggtgtgctcctatttggcggattagcattacggtggcaattattctcgattcgagaatggctgacgatgccaggtggccggcaactattgcgcctttcgaaaaaaataaaaggtaggacaaaataatgcgcttagataaatttttgaaagtatcacgaatcattaaacgacgttcagttgcgaaagaaattgcagacaagggtcgaatcatgattaatgatcgccctgcaaaatcttcaagcaatgtcatcgtgggtgataaactggagatcggatttggtaataaaacgatggtcgtacgcattacacagatcatcgaaactacgaagaaaagcgatgcagctgaaatgtatgaaattttggaaacaagacaagctgaaaactttgattaaggaaaaagcgctggccgaattaatatgggccggtgcttttttttgtgactttgttgagcatcttaataaaagtcattaagaatctgggatcttagttgacgacctttttgtgaaattgctataatgaacttaattccgagatggggggcttctaagtgagtcgaaaaattgcgaaaatcgagaatgcatttacccagcaacaagcagcccagaaaatcgtgcaagacaaggcagcccatgttaagcgtgttcataaacgccgcttatgtggcttggggattgttgcagtattagtcgtcttaatttgtggtgtgcagattttccaaacccatcattcattggccgagattagagaaacaacggcagctaaagaaaagacattaaaaaaagctaaagcaactgaatctgatttaaagattcaagtgcaacagctgcatgataatgattacttggccaaatacattcggtacaagtattactattctaaagacggtgaaaccatcttcagtttgccccaagacaaggcgcctaatttaaattagcaacaaaaataattcagaatacgaccttgtttcaagggcaaagcgtgctatacttattttattaaatatcacgcttaagtgattaaaagtttgacgagttcaaacgaccatttaggaggacgtagttttatatggcagttgaagttggttcaaaagttgctggtaaagtaacgggcattacgaattttggtgcttttgtagatttaggtgaaggcaaaaccgggttggtacatattagtgaagtgtccgatagttatatcaaagatattcatgatgttttaaccgttggtgatgaagtcacggtgaaggttatgtcagatcaaaacggtaagattggtttatcaatccgcaaagccgttgatcaacctaaagtgcaagaacatccgcgccctcaaagtcgtccaaataataatcgcggtggatatcgcaaaccagagcattcaagcgcacctaaaaaagaaggctttgatgatttattatcagggttcttaaaagatagtgaagatcgcttatcaacgattaaacggaatacagaaggtaaacgtggtggccgtggcggccgtcgcagttaatagaacaaattgataaaggttggcttgaaagtttagtgatagactttcggggcaacctttatttcatttcaagtctgtgttggagaggaatcggtatgttagaacaagcatttcaaacacatcttcaaaaagagcagttctggcaagccggcgacaaggttgtggtggcaacgtcaacgggagtcgattcaatggttttattgtggttattgactcatctgccccaaaaacaacgaccccaagtcgttgtggctcacgttaatcatgaattgcgtgcgcaaagtacggctgaagaaaaatatttaacccagttttgccgattgcatgccatcccgttacgcattcaacattggccaaaagcgagtcatcctgaaacaggggttgaagcggcggcacgtcaatttcgctatgctttttttgatcaagtcatgcgaaccgaatcggcgcattacttggtgaccgcgcatcacggcgacgatcaactagaaaccttgctcatgaaattagttcgtagcggtgaattgcatgaaatgcgggggattcggcaagtcagaccgtttaaaacggggacgttaattcgcccgctattaccttttagtaagcaacaactgcgtgattacgctgatcagattggtttgaggtattacgaagatcaaaccaatcaggaacaaactgttcttcgtaatcggatgcgacatgcggtggtgccacttttaaaacgagaaaatccacacttgattcaaaatgccaatcggttcagtcaaagtctgacccaaatggtggcacaccaagatgatctaaccgcggcgttactgccattgttggcaatcaaaaaacagccggcggcaattgaagggcgtttagaccaactcgatggcttgaaccagacacaacaaagggcgctctggcaattggtgtggcaacgatatttcaagactttaccggcgttaaaggcagcccagttaatgcaagtgcaacaattgttggcgaacccgcagaaaccgcaaggccaagtggcattgaacaatggcatcatttttgaaaagcagtatcggtgttttcggattggtgtccaccaaatagtggattctttggtcaaaacacgaacattagcgattaatgaatggctgcggttaaaaaatggcgaacaagttggtgttttcgatatcgaccatctacctaatcaagttcaacggcaacaggtcgtttggttagcaccagaggaatggccactgcaactcagggcgctacaagcaacagatcgaataatgcttgataaggcacaccacaaaaccattcaacggttatggattgatactaaaaccccacaggcaaagcgccaaaatgcatgggcggtttggaccccaaatcaattgcttggccggccggatttacggatttcggcgttgtttaatcgcgaacaaactggtaaaatacggtacatactatgttatttagatgattaagcaaattacggaggctggcacaatgttagaaaaagatattgaacgcgtattatattcaagagaagacattcaaaaggttaatcagcgcttaggaaaacaaattacagcggattatcaaggtaaaaacccgttattaattggtattttaaagggtgcgatcgtcttcatgacagatttgattcgcgaaattgacctccatgttgaaatcgactttatggatgtgtcaagttatggtgctgagaccatctcgtcaggtgaagttaaaatcatcaaagatttagatacgagtgttaaaggccgcgacattatcattatcgaagatattgtagatactgggcgcacgttgaattacttaatggcaattcttaaaacacgtcaagcaaactcaattaaagtctgcacgttaatggacaaaccaagccgtcgaattgtgccagttcattcggattatgttgggatggaagtcccaaatgaattcgttgtggggtacggattggactatgccgaacgatacagaaatatgggaacaattggcgttttgaaacctgaaatttattcgggtaaataaatggtcaataaaagtcagatatgttatagtttaacagtatcaaaaggtcactgtgtcacaaatgatgagaagcttcaggaggtcacgtatgaacaacaaaaagaatggactgtttagtaatagtctgttttacattattatcttagtggctttagtcggtgtgttctcgttcttcatgaacggtaacgctggatcagagtctaaggaagttcaatcaagtacatttttaagtgaattgaagaccaataaggtcaagtcattctcaattcaaccaacgaatggtatttataaaatttctggagaatatcgtaaagcacaaaaaacagaacagcctaaaaagaatcttttaggacaaaaaacaaaagcaagatcagttaaacacttcacaacaaccttattacaaagtgattcacaagttggggcaatgaccaagttagctgacaaatcagcaaccaaggttgaaacccttcaagaaccacaatctggttggtgggtaagtattttaagtcttgtattgccattgatcatcatgtttggtttattctacatgatgatgggccaagcgggtcaaggtggcggtcaaggcggtcggatgatgaactttggtaagtccaaagctcaaaaagccgacaagaaagctaataaagtacgtttctctgatgtcgctggtgcggaagaagaaaaacaagaattagtcgaagttgttgaattcttaaaagatccacggaagtttgctgcattaggggctagaattccagcgggtgttcttttagaaggacctccaggtactggtaaaaccttattagctaaagccgttgccggagaagcaggtgtgccattcttctcaatctctggttctgacttcgttgaaatgtttgtcggtgtcggtgcaagccgtgtccgtgatttattcgaacaagccaaaaaagcagccccatcaattatctttattgatgaaattgatgctgttggtcgccaacgtggtgccggcatgggcggtgggcacgatgaacgtgaacaaacattgaaccaaatgttagttgaaatggatgggtttacggggaacgaaggcgtcatcgtcatcgctgctactaaccgttcagatgtcttagatccagcgcttttacgtccaggtcgttttgaccggaagatcctagttggtcgtccagatgttaagggccgtgaagccatcttgaaagtccatgctaagaacaaacctttagccgatgatgttgatttgaaagaaattgcgcaacaaaccccagggttcgttggtgctgatcttgaaaacttattgaacgaagctgctctagtagccgctcgtcgtagcaagaccgatatcgatgcttctgatgttgatgaagctgaagatcgtgtgattgcgggtcctgctaagcgggatcgcgtgattaatcctaaagaacgtgaaaccgtggcttaccacgaagctggtcatgcgatcattggtttagttcttagtgattctcgtgttgttcggaaggtaacaattgtccctcgtggccgtgctggcggatatgccatcatgttaccgaagaatgatcagttcttaatgagtaagaaagaattaacagaacaaattgttgggttacttggtggtcggacagctgaagaaattattttcaactctcaatcaactggtgcttctaacgatttcgaacaagcaacggatattgcccgcgggatggttactcaatatgggatgactgataagctcgggacagtggcccttgaaaaagaaggtcaaccattcgttggggcagcttacggtcaaggcccagccttctccgaaacaactgcggctgcaattgatagtgaaattcgtcggattattgacgaagcacatcaacaagcacacgaaattattgaagcgcaccgtgaacaacataagttaattgcggaaatgctcttgaagtacgaaacattaaacgaaaaagaaatcttgagcttgttcaatgatggtaagatgccagaaaagaacgctgaagaattcccaagcgaaaaagcagctacttttgaagaagctaagaaggcgcttgaagcaaaagaagccgcaaaagaagattcagaaaaagaaactgataaaaaggatgtgacaatcacacctgatgaagatgatcaatcgacaccagctgaggataatcaacatccagacgatgaagcataaattgttacaccaaaaaggtcgacacgattagtggtcgacctttttgcatcaatccataaaagaggttatttagatgacagattatttaattaaacaaatttcagaagatggccaacttcgtgcttatgcagtgaacgcaactgatgttgtaacggatgcgcaagaaaaacatgacacatggtcaacttcatcagcagcgtttgggcggacgattgtcggcacccttttattgagtgccgctggcttaaaaggtgatacgaagatgacagtcagagttgaaggtgacggcccagtcgggaagattgttgtcgatgggaatgcgcaaggcacagttaaagggtatgtgacgaatccacacgttaacctaccattgaacgacaaaaataaaattgacgttaaaggtggcgttgggacaactggtacgttgagtgtcacgaaagatcttggcttaaaagaaccgtttaccggtcaagtaccattggtatcaggagaattaggtgaagactttacttactaccttgctaaatcagaacaaacaccatctgcagttggcgtttcagtcttcgttaatgaagataactcaattggtgtcgctgggggcttcatgattcaaattctcccaggggcggatgaccggttaatcgatatcttagaagcgcggctgaaagaaatgccgctggtgtctgaattactccaacaagggatgagcccagaggaaattatcactgaaattgtgggcgaactcccaatgaagacgttagaaaaaatacctgttaaatacgaatgtgattgttcaaaggatcggtttgcaaaggcactcagttctgttgcgccagcggatttacaacaattaatcgatgaagaccacggtgctgaagcggtttgtcgtttctgtggcaagcaatatcaatttacagaagcagaactaaaggcaattttagccgcgcaatagaatagtcgcaaatttttgcctgaatactatttttttgctatgataatttggatattgtcggaagacacgaagggaatgggttggcattatgacatggcaaataggagacgtgacgattccaaatcaagtagtcgtcgcaccaatggctggtattacaaacgcagcatttcgcgtaactgcaaaggaatttggcgcaggtttagtggtctgtgaaatgatcagtgatcgcggaattatgcacaataatcaaaagacaatggggatgatgtttgttgatccgaacgaacatccagttagcatccaaatttttggtggttcaaaagacaccttagtggaagccgctaaatttgtggatcaacatacacaagctgatattattgatatcaatatgggttgtccagtgaataaagttgttaagacagatgctggcgcgcgttggttattagatccaaacaaagtttatgaaatggtctcatacgtgacagatgccgtgaagaagccagtaacggttaagatgcggacaggctgggatgaagatcatattttcgctgttgaaaatgcacttgctgccgaacgtgctggtgcttcagcacttgcaatgcacggtcggacacggaaacaaatgtacaccgggcaagcagactgggacattttaaaacaggttaaatctgaattaacgattccatttatgggtaacggtgatgtccggacaccacaagatgctaaacgtatgctagacgaagtgggtgctgatgctgtcatgattggccgggctgcgctcggtaatccatggattttaagccaagtggaaacctacttacgaacaggtgaattgattgctgaaccaaccccatgggaaaaaattgcaacggccaagttacaattacaccgtttagtcgaacttaaaggtgaaaatgtggcttgtcgtgaattcagacaacaagctgcctattacttgaaagggattcctcgtgcggctaagaccaaagcggcggttaacgaagtggaaacggaacaagccgttggcgatattttagaccgctttgtagaagaaaccgaagcgagaatggcaaattaggttccttatgttggtgttttcgtgttaaaatcaacattagtagataattgaatgtatggaggaattgtcagttgggacaaaaagataatcaaagagaaatgaacgaccaactaaaggtccggcgtgaaaagttacaattgttaaaagacgaaggaattgatccttttggtagtcgttttgatagaacacatatggctgcggaattacacagtgaattcgaagcaattgaaaaagacgatttagatgctaagaatctagaagtcacaattgcaggacggatgatgtctaaacgggggaaagggaaagttggctttgctgacatccgtgaccgttcaggtaaaatccaaatttacgtgcgtaaagatgaagttggcgaagaaaactatttaattttcaaaaaggctgacttaggtgatcatttagggattactgggcaaattatgaagactgacatgggtgagttaactgttaaagcaacgcacctgactttcctatcaaaagcattacgaccattgccagataagttccatggtttaaccaacgtggaacaaatctatcgtcaacgttacttagatttaatcgcaaatccagagagcttggatcggttcacgaaacgcagcaagattatttctgctgtccgtgaatatttagataacaatggctttactgaagttgaaacacctgtcttgcatggtcaagctggtggtgcatcagcacgaccatttattacccatcacaatgcgctagacatcaacttgtacttgcggattgcgcttgaacttcatttgaaacgattaatcgttggtgggatggaacgtgtctatgaaattggccgcgtattccggaatgaagggattgatacgaaacacaatcctgaatttacaatgctagaaacatatgctgcatactttgattataaagacgttatggatgaaacagaagggatcatccgatttgcagcgcacaaggttttaggaactggtcagatttcatatcaaggacaagcgattgatcttgatggtgattttggacgggttcacatggtcgatgcaattaaggaaaagacgggtgtcgatttctggcaaccaatgacggttgaagcagcgcgtgaattagctgatcaacaccacgtgaagtatgaatcatactggcaagtggggcacatcattaatgcgttctttgaagaattcgtggaagatacattggtacaaccaaccttcatctatggtcatccagttgaaatctcaccattggctaagaagaatgctgaagatgatcgttttacagaccgttgggaattatttatgtacggtaacgaatatgcaaatgcctttactgaattaaacgaccctatcgatcaacgtgaacgttttgaagcacaagctaaagaacgtgaaaatgggaacgatgaagccgaaggaatcgatgaagattacatcgaagcattggaatacggaatgccaccgactggcggacttggaattgggattgatcgactagtcatgttactgacagatgccgcatcaattcgggatgtcttattattcccaacaatgcgtccagacaacaataataacgattaagattaaactaaagcccgcaagcagacgatttgcttgcgggctttttttattgaaaaaaattgggattataaaaagtttttttagtgtattttgtgggtgaataagcatcaactttcggtatattatgttgtttgcgcgagttgtttgtttaatagttcatttatttgcataaattgcggatactatcgactgtttagattatgaaagttcataaataacagttgagattaatagttgacgaaaggctgtagagctgatatagtagtctatgttgtcagcgagataaaacattgttgctaacgagtcagataattaaatcagtttgaatatttattcaaaaaacatttaaaaaattattattagtaaaaatatgactcctaacaagcaaccgcagccgatgttgaaaaagaagctcaaaacgctccacacaaaaaggacgcataatataaacaggaatgtcagcatcattgccacctctttatttgcaaaccacgctcacttttaccggcttagatcaactttttcattgatcagccacacaacaatgtcgccaattaaaaccacaacaaattcaccaatgccgactgtcaaatatgtcatccaaaacaaaacttcactgaccagatgtaattctagtgcgactgcctatgacattccggccccattgatgactataaattagcaatcaaacacccctcatgtaacgtttgttgaaaaccaccatagtattgagcagttctgacaaacgaaattgaatcggtctataactcaatggtgtaaaagcaaacgttaaaactacataaagtgcagcaatcaaaactgttttagtgatctcagcaactttattattaagacgtgccctttttaagaatctcctagtttttaggtgggatggtcacgaaccaccatgtaacaagtaattattccattaatactgtactttcaagtatagaaaaaagacgaccgtttatcaacctgaaaagcatgttataattttactattagacattttaacaaccgagtaactagtcgctaaaaatcgtggatcaactaactgtctagcctaacaaatatttgacacgacccacgaaatttatacaatgaatggatattactaatgaaaatcgctattttaactgacagcgctgcgatgatcagcagtaaagtcggatcacaaccgaatattagggtcttacagatcccactttcattggatggagaagcttattatcccaatgaattaccagaagttgctggaatagaaacgctaagggaagccacgcttaacactgtaacagaagagcagatccctctaaccacaatttctgcagtaaccgatgaacttcaacaagctggttatactgacgtactttgtatacatattgccagttcgatcagtggcttaggctcaaatctctctactttcgccaaaagctgtcaacagccgcttaagatccatctctttgattctcatactcttggtcctgcagaaggagcgttggttgaacgagcacttactatgattactcacggactaaaaattgctgacattttagcagaactaaccaagtatcgccaaaagcaacatacactggtcataatggaaaatctcaaaaacttgcgtcggatcggttctatttcaaataatgcacatctcttcagtaataatatgctgcattataaaaccttgctacatttttccgaaaatggtgaacttgaagtcttgatgaaaagttcacgcacgaaaaaaattgcaacggcgctattgaataagtttcgcagctctgcagcaaaaccggaactagcaatcgtggcagacaatacaatggtcttggaaaaatatgtttcttgcctgaaagaaattatgccgcaacttcaactagtaactgatctatattcaccttcgatattttccttcatcggtccacaagcactgatcattagttggcaaaataattaactacatgcaaaaagatcgtccttcaatttaaagaagaacgatcttttttgtttgcagttctcttatattaactttttgctatttaataacggactcgcaattggccagcttctcagctttctgcttagttatctaaatcaaattgacccgtcagtttttgcaactgagcagcagtttcttccaaggtcgaaacatgttgggtaaactcatccatcgtagcttgcacttcttcagagttagccgaaacttcctctattcctgctgcgttttcttgtgttgaagctgagatgctttcaagtttatctaagatcatcttttgagtttcactgatctcttttgtaccctcatggatcttttgaacatttgcacccatagcttcattatgcttataaacgttcattgtcgacttgatggcttctgtgatcaaaccagtctgtttttcactgctttccagtgagtctgttgttgtcttgaccaaaccagttgattgctgtctgatctgttcaatgatcgactcaatttctttagtcgaatcattactttgttcagctaacttccggatctccgctgcaacaactgagaatccttttcctgcttcgcctgcactagccgcttcgatcgatgcattcaaagcaagcaagttcgtctgtcttgcaatatcattgataacgttaatgatcttagtaatgttttgtacatcactatccatttcctgaacactactcatcaaagcttgcattccgttgatctcatttgaccagttaccattgaccttgtccatgacatccaggttattttgtccaacttttgaagcttctttggatgaattagcaagctcttccatattcgcattgacattatcaatatgtgcagtgattttttgaacgttatccacgctttcagtagtttcttttgcttgtgatcctgtcacttcagcaatttcagtgatcgtctgtgcgatttcttcagaagcagttgctgtttgtttcgaaaggtcaagtaatgatgcagctttttcagaaacattcttggcttcttgctgtgtttgtccgatcagaacagtgacagaagcgatcatattattgtaactagccgctaatctgttaaactcatgtccattcacatcagctctggtcatcttttgagctagacgttctattggtaccttagaatactcgattttttcacccactgcaggcacgtaactcatcttaccttggccagcatctataaagaacttctcaagtattaataaagcacgtttgagcaaacctgcactatagtaagatattatcacggctaaaatgatgatcgccaacattgagattgtcaaggttatcaacatatgatgtgtgcctgcgctcaaatcactattgttcatttgggcgatggtccaattgtcagttgtgccattgcccttgtcaaaggtaaccttattgatctgcgaacctccaggaactttgatcgtccccttctttttcgctgaagcagccactgctttataaacggctgtcttgttgatcattttacctgctttaaaagtattattgcttttaccagtgttctttttgatcaaaaccctgccggctttagttaaaacggcggcttgaccattgtttccgatttccatcgattcaacagatttttgtactgatgaatatgaaacagtaactgctaaaacatgggctttcccctgcttatctacgattttctgggaaacacttgcactatacgaatgattagccggatctttataaggaatcgaccaatatgcatgtcctgtgggtgctttttgataccaatcttgatctaaaatattcatatctttaggcatcgcaaaattcgaataagcatatgtaccatcagtgttgacatacatcaagttggtgatcgttccctgggcgtcgccattggcaattttcaaagttctgttagcatcttttaagttgacattattggtcaactctggtcttttttccaaactagcaatttgtccagtaacatcttgccgcatgtcaacttgttgccgttgcaaaacatttacagccgtcacttttaaacggtcatttttctcgatcaattgctgacgtgtattcccgtatgagatcaaattcattataattgccggtaccaatgctatcaataagagtgacgataaaaaatacttctgaatactctttttagcaacttttttcttacttgccattttctttccccatctttccctaactatctaatttgatcccctaaggatctcatgactatcgttcacaaaagcactgaagcaaacaacccctaaataatatgtttgccagtatttgcttttgcttgcgctgaagtcatcaaattaacgagcaattactgctcttttacccctttagccccactaaaacaaaacataactttaacgcagataatctaatatcgaagtttgcatgaccttagtccccatagccaaggtcgaacgatatgcaatcatttgattttgatattccatatacttctctgcaacatcaacatcttgtttattagacaaagtttctgctaaagtatttttctcggatttgttccgagctgatgctgaacttaaacgattttcgatcgaaccgaccttagacctatagtcagtaaagttttcagtaaatttatcgatccctgacaaatattcactggataactttctatcaggatcccccgatttcaaagtatcaatcaaaccgctaaagaattcggtcagttcagacttgctatctttatcaatgccagacgaaccatcggcatgcatcaaacgtgaaccatcagtagctaaatctaagctgacaccatctgagatctcgcgctgtaaattatccacgttgcctctgtattctaaactgacagctgccccttcagcatctttaataacagcaaatggtggctcttgtgtctttgtccccccaaagatatacctgccatcatagttggtattcaaggcatcaactatccctgagatcgactgtgagatttctttacggttcgcattgtaaacggcaggtgtagctgttccgctattggccgacgactcgatcaaatttctaatgttaagcatcaaggtcgaaacattatctaaagctgagtcttgcgtttgcgaccagagcgtggaatcagaaattgtttggccatacgttttgttttgtgaaattgaaacattcagatctaagatctttgcgactaacaaaggattatcagaagccttattgacctctttcaaactagacagttgattcattgtcttttgaaccttgttagtactgatctgtaaattcttcaagaaatcagaatattccattttactggaaaccctcattgattaaacccccgttctattgatcaaagtatccaacatttctgaaacgacatttaacaatttggcattagcttgaaaaccttgttgaaatctgatcacatctgacatttcttcgttcaaattaacaccagaagctgcttgatctttgtattccaattgattcaacgctgataattgagcagatgccatattgtctgctttttgtttagatatcccattttttgtcacgatactgttataggcacctggaatcgttaaaccatcttgagaattattgaaggtcaaagtacccttattataattttccaacaatttcgccgtatcaaccggataatcaagcttactcttaagcgccttagccatcgctaaagcacgtccattatctccttcggccggatcatcaccagtaccgactttcattttgcctggatctgcgactaaatcatcgttgatcttaatacttaaagccggatcactgggatcggtgatttcaaaaaagccgctatctggagtttgcccgtcagaataaacgatattttcaatttctacaacgcctttagcaaaatcatttaattcagctcgatggctttccacttcagccaatgattcttgcaaaccgccgatcgaacctgacttaactgctaacttgctatacttacctgaaccgttcgctgtttcaaaaacgacttctccgaccgtgaagtctccatcgatcgtttgctttggttgtgtttcatcaccatttggcaaaatctgagctttgccgtcagagttactgacaacaacatttaacttagtctgtactcctttttcattgtcaaccactgcatggtcaccgatactaagtgaagcacggccatatttgtcaaacgaaactgttaaattactttcagcagacatatcctttaataaactatcgcgctgatctaacaaatcattgggctgttcatcacttaaatgactgtcatacaactgttgattcaaattagcgagttgttccgccttttcattaaaatctagaacagttttcgccaaagaagaacgtgtatcagtagaaacttgtgaaacttgccgtgcagtttgctggatataagaagctaaagcaacacccatttgaacactattagttttagccgtatccaactcgggattgtcggctaacttttgtaagctgtcagcaaaattattcaattgtgtaatgagtccatcgtctgacggctcatgtaatgcattttctaataaagccaaaacatctgacttttggacgttaaaattgtaatctgaattagaatctcgaacctgtgaacgtacaaagtcatcaacgatccgtgagataccatcagcttgaacaccgctaccgatcaaaccgactcctgtttttgcataagggatcttcgttgataaatcaacacgttggcgcgagtaaccttcggtattagtattagcaatattatgactgctagtctgcaagccgatttggttagcatctaacccactgcgagcagtattcaaagtaccaaataaacctgacatgaaagtcctcctaaagaataacaaggtgaagtgaaccgcataaaagttgagcactatcggactttgacaataagtcgtggtttgcgacttgttggcgaagttggataggcacagacttttggttcacgcaacctgactaagaataacaaggtgaagaaatgcggttagaagccgagcattaacggactttaacaataagtcgtgcatttagcgactttttgttgaagttagttaagcacaagcttttgcatttcgtaacctgactaataacaaggtgaagtgaaccgcataaaagttgagcactatcggactttgacaataagtcgtggtttacgacttgttggcgaagttggataggcacagacttttggttcacgcaccccttctacaacctaaaatgactgatctacgattgccgcaggaatatcttctcgcttaggttgactttgagtcctatgctgatcaacataagtattttcctgtttttccaagctgtgttggatcgtatccatcatttttttctgataagccaaggcttgttgcgtcaacaataaattagtttcttgcaactcttggatttcttgaatcagcatctttgttttgtcgccaatttcaccagtatacttctcaaaaatcggtaagaaatcttccttttgcggaacaatttcatttagcgattctccgtcatcaagaactaaaaacttttgttcacgtttcagtattttgataaataatttaagcttagcctgaaatgccttttcattcatctttatttccttcttgtttcatttcctggaacatctgatcagcaatcttttctggtgagaccttatatgttccgtttgccaactgctgtttgattttgtcgaccttagccgcatccacatcatcgtctatatcacgatttttagcgttgtttactaatctttgagcagtatctgataatttaacattaaactgttgtggtgcaccctttttcgttgttttcgaggcttgattgtgatagtagttttggatcatttgtgaattgattgaagaaatatctcgattaattttcatgtgaatgcctcctttttcctttttgactctacaaatacagttatcggccaaaataaaaaaagttaaacctaaaagttcaactttttttaacttaatttattttattgatcctttgtttttgagaaatgatcttattgatccgcacgccaaagttttcattgatcacaacaacttccccagttgcgatcaattttccgttcaacatgatctccaaaggttcgtctgttaatttatcaagttcgataactgaaccagtgttaaagttcaaaatatctcgaacagtctttttagtccgccccaagacaacgcttaggtttaatggaatatctaagatcaaatctaagttatcaccgctgatttcttggtgactcgacaattcttcaaattcgggtttagaaatttccacgttactgacctgcgcctttctttgtggttgttcattgcttggtttttgcgggatcttaacttgttgcggagctggttgtggtttactaatagccttggctttctcgactgctggtttctccgcatcacgtttgacaactgttgctttgtcagacatcattgctttcacaatatctttgaccatttccaaagaaaagatctgcataatttcactctcgatcagtccttctacatccaagttaaatgaaatacaataaatttcttcctcacggtccaaagagtcttcattcacatcgccgggattttcccacaaatgcacttttggaggaagaatatcgactttttggttgatcatagtagccatggatgtcgaagctgaaccaatcatttgattcatcgcttcacccacggcacttaattcgacttcagtaaattcttctgaagctgactttccatcgccacccatcatcagatcagcaataaccgttgcatcactgacctctagcaacattaagttagttcctgctaaaccttcacgaaattcaacggtcgtagcaactttgggtgcatggatctggtcgagtaattcaccaaaatggatttttttaacacgtggtgtcgtaattgccacacgatgagtcagaattgatgacagagttgttgctgcctgtgacatggaaatattaccaacttcaccgatcaggtctttgaccccttggcgatctaacccctccaataattcttcatcatctgattgcgcagcttcttgagtatcactgccattcatcaaagcatctatttgttcttgtgttaaactctccgtcattcttcttccccctcgatcttgctcaataactcaattgcgaattgtccattctttttccctggtttgacccagtaaaacggtcggtcttcaatgtacgtatctaacggactggagattttagagtccagcttgatgacatcgcctggttctaatttcaagaaatcagccaagtccatttgggtgttgcccaaaacgacttccattggcagatctattgcgtttaacccgtgttttaattcgctttggtcatcttcacttaattcctggcttgagtcaaaccaattatgcaaactcaatttatctaggataccttcgaatgaaacataaggaatacacaagttaataaatgttgaaactccgaaaagctgtactgtgaaagtagctaatacaactggttcattaggtgataaggactgtagtaattgtggatttgtttctagagattcaagctcaacatcaagtgtcaggacttctttccaaactgattgcaaaattttagagaattcacccataacctcatccaataaagttaattcgatatctgtaaaaccatttttatccaaaggcggttgattttttcggttactctccaaatcagcaccaccacacaacaattcgactaaagtcatacatagttggggattgatttcgatcatgtgtgatcctttaaggggagctgctttaaacattccgatcaaagtcacacgtgggattgaatgaatgaattcgtcataactgatctgctcgatcgatgctaattgcatatccaagttagtccgcaagatatttgaaagaacattgccgctcatcttagcgaagtcttcaaaaatcatgtgtaaggtatttatatattctttagatagccgtgtcggccttctaaaatcgtatggcttcgcttgtgattcgtcattttgctcttcatcgatcacttcttcgtctaattcgcccgaatcataggcatttaaaagtgaatcgatttcctgctgtgataacacctgatccacaaagacacttcctctcgctcattagttcattccacaattaaaaaatcttatcattaacgtcgatcacatcagcaatcgtttgttcacccaagtctaccacaccggtaaaataaagggcggcttgatcttcacttagttgaatatcatcaggatcaacatccatcacttcgatcacttcatcgatcaataatccacgacgttcatcgtcttttttcattatcataatatttcggtttgtttgtgattccgccaatcctactaactgtgccaagctgatcaccgtcaacactgtgcctcgcaaatttatcaaacccttgacccaaagcggagcaagcgggactttggtaatttgaaccgtatcaacaacttcttctacagtttcggcagctatcaaataatgttgctgattcattttaaacaaaatcatctgcattaaaacacactccctttcttaattaaattcagtcaatagaactttaattaagacaatgccttatctaaggctttgatcacccgatcagtatcaaaaggtttgacgataaaatcgactgctccagctctgatagcatccatgaccattccttgttggcccatcgcactgcacattacaacttttgcactgctatcaaattccttgatcattttcacggcctggatcccatccacatccggcatggtaatatccattgttaccaagtccggtttctcagactgataaaggtcgaaggcttcttgcccattttgcgcttctccagcgacctcatagccgttcttttctaaaatatcctttaatttcattctcataaaaacagcgtcatcgacgatcaaaactttatttgccacgcgacattctcctctcaaactccaagtgattttatcattttgtcaattacacccaactctgggatgaagtatagtgaagcttccaagtaattagaatcataagtaaattcatttctgatcaccatgatctcatcaccaaactgttcaaattccatatatgcactactaatcacggcaccaaacatatcaaacgaacttaccggaacttctggttttaatttcttttccagcatcccgccgatcgatgttaaaaatgaacttgaaacaatgttagtcaattcactaactgcagaaaccttaatttcttcggtcacaccttgatctgttcccatcatcaaacttgagatctctttagcggccgggtccgtaataacaaatagcatcgcaccctttaagtcaccatggatgctgcttaaaacggtataaacttcctggtcatcggccataacttgctggtaaagctcgtcataacttaagatattgacttctggaacacgcatcctgatcacactgccaaccatttgtgatattgttgtagctgctttgccgccgccaatattcataacttcttttaacgcatctaattgtatgtttgaatatgccatcttaacccacctgtgcgtctttacagatcgtattgacgtccaagatcaatgcgatcgagccgttgccaaggatcgtcgcgccttggaatcttttgattttttgcaacatcggatcaatcttcttgattacgatttcttgctgtccgatcaattcatcaactacgatcccaaagtctttattatcacccttgatcaagatcatatatttctttccctgatccttttcagggatattcaaaatgttggcagtccggatcactggtgtcaatcctgtctgtaaaggatagacttcctgactagcagtttgtaaaatattatcttcatggatcatttcgacccgttcaacaacatctaacgggatagcaaatgtttcttcgcctagtttgaccatcagtgcctgaataatagacaaggtcaacggtaatttgataactgttttcgtacccacattgactttactgtcaacttccaatgaaccgcccagttcgttgattttagcttgaacagcatccaagccgaccccacgtcctgaaatgttagtgatctttttagccgttgaaaagccaggattaaagactaacatttgcagctctttatcactcataccggtcgtatcgattccacgctcttcagcggtaattttaaggacttgtggatcaaggcctttaccatcatcgctcaaagtgatcatgaccttatttccttcttgataagccgataattttatctttccttcttccggtttgccaagtttctttctgttttcagcatcctcgatcccatggtcggctgaatttctaactaaatggatcaagggctcactgagttcggtaaccacagttttatctaattcagtttcttcgccctcaatttcaagagtcatctttttatttaactggttggaaagatcgcgaaccatccgtggaaaacgactaaagacaacgctgacttgctgcatccgaattttcaaaaccaaatcctgcagttcagatgtcaagcgtgaaacctgttctaaagattcatgcacttcttctaaattttggcgactattggcatcttctagttgattgcgataaacgaccaactcagatacaacattcaaaaaggtatccaaccgagaaagatcaactctgatcgactgatttttggcatttttttgatgcgaagtgctcttcttagacggggcttttgctttcttaggttcaggagcagcgctttttttctcagtagtattttctttgtcaacagctggttgtgcgtctttttgtggttcttcagcggctgccttttgagttttctcatcgaattctgccgtcaaaacttcagcgatctcactactagattcaatgatcttcttaatgtcatcttgattactttcagttaggatcaacaatttgaaatctgtatcaaaattgccttcttccagctggtcaggagccggttcaatgtgaataatatctccttcactgtcgagcttatcgatgactaagaatgctcgtgggcctttcagcattgactctggatcgattcgaactgccgcactgatcacattaagatgttgtgttttagcctgttcgatcactgataagtcagcttcttctaaagtttcaaatttcagttcgagctgactatcttctggagctttcttctcatctacatttttatcagcggtttttgtttggccgccatctaattcattttcaactttatctaattcattccataattctgtgatctgatcttcgctttgttcttcttcatctcgcaagccgtctagaagttcggtcaatttatctaagcaccgaaaaatcagagaaatatgatcacttgttaccttcaacttgcctgatttgaaaagatcaaaaatatcttccattttatgagtcaacttgctcatgacagtatatcccatagttgctgacattccttttagggtatgtgcagctctaaaaatttcattgatcaaatcgatattgtctggttctttttcaagttctagaatattatcatttagttgtgttaaattatcttcgctttcttcgaaaaagatatcgcgataaacactattatcgtcagccatcaatgatccccccattcaaattatttacacctaagcacgaatggtctgtgcttattgttaaagtccgctaatgctcgacttttaaccggctcactccaccttgttttcttagtcaggttgcttgagacagaaagctccgcctatccaacattagttccacatcgcaaaatacgcaatctgaatctagtgtccgatagtgctcactttctcccgtctcactcaccttgtttctcatatataaacgactctattttctttaaccccagcttttctgcgctgttaagtgtttctgttgctcccgtgaacaatattccacctggtaccagcgcctcacttattttttgataaactcgatcgcgtgccatgggtttgaaataaatcgttacattgcgacaaattatcgcatgaaaacctgattcatactggtcagccaataaatcatgtttcttgaacgaaactcgttgtttgacggctggccctatttgatactggtctggtcctaatgacttaaaatatcgtctaacatcagtatcagaaatattttttaactcatttgtcgaatactgacctaaacgtgctttctttaaaatgtcatcatcaatatccgttgctagaacattgcccataagatgatttttttctaagatcatcgctaaggtgtatggttcggcgccggtcgaacaagccgcactccatagtttcaaattattaaattgtggagcaactttttctaacaaacatttttcaaaattactaaatatttcttgattgcggtaaaattcagtcacattaattgtcaaatgctcgataaactccgctcgtttgattggatctttgtccaaaaggtgttcatattcatgcaacgagttgaccccgtttttatccataatatttttgatcctgcgttgcatttgtctttctttataatcatcgagatggatatgatatttctgctccacccacctattaaaatcagtaaaattttcttccaacattttaatttcacccaacgatcgtctgtagtattttcccgatctcatgcaaacttacaacttcatcgacaacttgagcttcaattgcagatcttggcattccaaaaacggtacaagattcctgatcttcagctattacataaccgccttcatccatgattgtttgcaatcctgccgttccatcatgccccattccagtcaggataaaagctgttaaattagcaccataatgagcagccgccgtttcaaacaagtaatcaacggctggccttgtcccatgcatcttcggacgttgatctaacttgagccggtcaccttggatcgtcatgtgataattaccaggacacaagtagatctgatttttgaccagcatattatcactagcctcaacgactgtagcgccgctttcttcatttaaacgctcagaaaacgtgcgggtaaatcccgctggcatatgttgtacgataaaaacaggaatgtttgtatgactcacacctttaataatttctaatagtgcttttggtccacccgttgatgagccgatcacaacggcttggggcctgatgttacgctttttatgtgctccgttgggtttggctttatgattggcagcaactggcggtttactagaacgtccgcaaatatttttgatctttgcatacagttctctgacccactcgtcttgaatttccatcaggttcacaggtttttcgataaaatcggccgcaccatattctagagctttgatggttactgcctgatcactgactgcacttagcattatgaccgggatagaataatcctttttgatctgtctaagggcgctcaagccatccataacaggcatttcaatatccattaaaattaagtcaaaatcattatctgcatcaaggatgtccaaacaatttttaccgtttcgtgcaattcgaaccgttgaaacactgggcattttattcaatatatccgagatcactttgcgcataaatgcagagtcatcaaccatcaaaatcctattcataaggtataagaatcctttcacatctttacttttctctcttaaacaacattctcaagtcatcaatgagcaaattttcgttaattaaaaaacagtacatagtttttaaatgtatctattttcctgtctcacgaccctgatcaaggtcgaaaaatcgtttaaatcgacgaccatggtccttccgctgctgccgcccgtatcttggccaactaacgggatctgcaggcttgccaactgatttaaaacagcgtcaacatttctctgaccaatattagctgtcgtgaggttgtttttaaatccaaacatatttgcaccaccagagatcttagcttgaaatttagctcgtggtgctttttgcttaagttctttgaccatcaggggtaacgccgtattggcatacttagccaagttcaaacctgaagtcccgttcttttcaaacggtttactatcagggagcataatatgactcaatccaccgatttttgaaactggatcataaacgatcgttccaatacaagaacctagccccacggtcattattttattaggcgcgtatgaaattttataatcagagattcctaccctggtttcgttagtgttctgcagcatcatccgtattctcttctttttctgaattttcagtaatggaatctacggatgaaatgatctcctcttcttgtgaagagttgaaaagataatctaagttcaactcgatcactacttcatcgcccatcttcaaaaattgactgatatacgggcgcttcagtgatgatctgtccaaatctttttcataatccgtctcagtcagcgacatgatccctacgatctcctcgacaaagatccccatcgtccgttcgctccaatgtgccaagatcaccttagagtccagcgttgcaggcgataattcgccgtaaagccgcttactaagatcaacgattggcaacatctgttcttgatattcatacacacctaatacatagtctggcacttccggcaacgagataaacttttcagtttcgatcactcgtttacccatttcaactggcaaagcaaaaacttgcttatgacttttaaaaacaacatattgtcccatttttgtacccctctttaacttctacaactaagaattgacgctgctagttttttaatttgaaactgccgatttgcaaacgtctgatctcatcagcttgttgaagctgttcgacacttttttcgagttcttcgatcaaggaataaaaatcatccaagttagccgatacttcctgtgtacttgcagaagtttcagcgatctgtgaatccatttgctgaatagaattattgactgcatcttttttatctttgatctcatctgcatgtgaactaacatcggttaggccatcgctcaactgcgtgacatcctcggtgatttgttcgctagccttcagtacaccagaaatattcatctgctgttgctgactgcccttgtatgatgcatccagatcaacagtcattttcttagacttagcacggatcgattcgatcagttctctaatattagtggttgatttgccggattgttctgccagatcacggacttcctcagcaacgattgcaaagcctttacctgcctcgcctgcacgagccgcctctattgaagcattcaaagccaacaaattagtctgttctgaaatatcattgatcaactgcacgatattgccaatactttgaatatcttgattcatcgccgtcatttcagaaacaatcttcttttgactttctgtttcttggttccaagaccgtgaaacttggcgcatcatttccatgttttgaatattactttgctttgattcgtcagcatagctattcattttttcaattttctggcgtatctcttcaatttggtcaccaaaaacattcatttgagcaactgtactttgagaagctgttgcttgctgtccagcattagtagcaatagtccccatcgcttgacggacaccatcgatcgaacttttagcgtgcgtcgattttccacttagatcgttgaccattgtttccgactgctcagtttcttccttgatcccagttaataaagctgaaaatgcattggctaaaccaagcaactggtcacgagttttaataaacattgggctttggccgggaactttgccgatctcgtcgatctgactgaaatctccctctaccatcttaccgacctgaacagaaagtttttttaatccgccggcttctcctcctgttactgccgtatttttatgaccaaatagtacatacaagagatgcaaagcgactacaatgaccgcgagtatccaaaaccttctcatctccgctgtctgtgccgaacttaaaacaaaagcccgaaaaacaattaaaacaatgactgtccctaaaactggcaagaaagctacttcggagttagcttttttagccgtcttcttacgtttttccatttgttttccttccccatataaaagatttggtatctgtcataatactcacttaagcaaaacgacactccaatctattatatcggttaaaattttatttttttaaccgtttaccaaacatagacatcttttggatcagaaaatcttgaatatccaccgtctggatcatctcggatcagttctccattttttagttccaaagttcgatgacgcaaagaattaaccatggtactgtcatgtgttgctaaaatgatcgttgtccccatctgattcaggcgaaagaaaatttgcatgatctctttggccgacttaacgtctaaattagcagtaggttcgtccgcgataataactggcggatcattcaataacgcacgagcgatcgcaattttcttttgttgcccgactgaaagttcctgaggcaaccgctcaataaatagcatcatttcgacactggtcaatacctctgccatccgctcttcccacttttcagtggggatctctagcgctgacatacaggtttccatattttctttgatcgtcaatcgcggtaaaaaaaggtctttttgcgaaacgatccccaattgacggcgtagtttgtatatctgttcatttctcaaatattcaatttcaatattgccgatccgggctataccagaatcaatggagcgttgagcacttaagatctcaagtaaagttgttttcccagccccacttggaccaactacataaacaaattcaccttgttcgatcacgcatgaaatatttttatttgcccaaacattgccatatttttttgttacatttttaagttcgatcaattttttctcctaaatcagtcggtaaagtggttgatggtctccatcatttcatctgtagatgaagcagcgcgggcattcatttggtaagacctctgtgctgttaataattctgtcatttgagtagccagatctacattggaactttcaagagttccttgcatcacactactacctgccccagcggctctaaaaccgccattggctaaatacaagttatcaccaactgacaccaatgaatgtgcgttgtttggttcaaataaacgtaaagaccctaaaacctgatcaccggatctgatcgttccgtctgaagaaactttcaagtcccctgctggccaattttgttctggcacccgcgcgtcaactgcaacccgatagccgttgctggcgatcaaaccaccgttagcatcacgatgaaagtctcctgccttagtcaagtatgtattaccatcgggaccaatgatcccaaaaaaagcattgccgttaatagccatatcaagtgcacgaccggtcgtttcaaattttccgacttgatcatcgactcgtgctcccgcggcatttagaccagtattcgaatcaactcttgcattagaattaccaagtgcaccgtcgctattagttaaattattattcatcagctcattaaatgaattgatgattcccttatagcctactgtgttttcgttagcaatgttatgtgaaacattatccagattattttgcaagccgttcaaacctgttctgttaatggataaaatagaattcaagttcatttttacttactctcctcatttcctacatgatctgttttctcaagcctatactaagtaccatcaagactcactgtacgcctgagaaaaataaccaactatttgatctagatccgacctagttggttgactgccttatccaaggtcgaattagtagctgatagcactttttgttgagcctgaaattggcgcccggtttccattaatgagaccatctcatcagcagtagaaacattagaattttcaagcattccagcttggaccggcaaatcaatttgctgggctccctgcccggtataaagcgttccgccgacattttgaagttgtgcatttgctgggaaagacaccaccatcaaattttgttgtgcttgctgggcatcaactgggccgccatttcgacctatcacttgaaaaccttcttcagtgatcagctgaccggcatcattcactgaaaaatgaccatcacgcgtatacgcgatttgaccatttcccattctaacggcaaaaaagccattgccttgaactgcaaaatccgttgccaagcctgtcggttcaagcgagcctttttgcatgtccagagcactgccctgaatttgattgccccatgtaaaaccgccaatctcatggcgggtttcatttttgggaccagcctggttattatgtaactgtgcctcgttcattgttgcttcaaacaaatttttttgcaggtagccaggtgtcttgatattagcgatgttaccgctaatattttcttgttgagcttgcaaaacattaaaactatgtcttaaagtatcaattcctctaatcatcattttcctccataaatccttttagttttccaactgcacgcccatggatctgtgaaacgcgtgcaatagaaacgtctaagaccaaactaatttctttaagtgtcatttcctgttcgtaatacaaactcaaaactaattgttctctttcagaaagcttgctgatcgccgctgccaactcctgtttcatttctgtttccaacaaatgtgcttgtgcatcgcccgtttttttatcacgaaagatctcttgtctgctaggcgattgttctgctgaaaacaagacatcctccaaagagatactagccatataatgcaagctatcataaatatcgttcagctttttctgattgatttggagcttactgcataattctttgtcagtagcttctcgtttcaattcttgctctaattcctgcttagcccgataatagcgagtcaaattgtcaaatttataacgagacaaccgaccgtgactgcggatctcatcaatgatggtcccacggatccgtacataagcataactttcaaatggtactttcttttgtggatcaaatttcttaagtgcatcgatcaagccgatcactccagtattgaagagatcttcgtagtcataatcggagcttttaacagtgatccgagcgatgaccttttcaactaaaggcaaatatttgataacttgatcttccatattcatctcatacaagaaaaaagctcctttctgaaaataccgggtgaagtaattgtcttctatccttgttcttgcaaatatgtgttgcaaattggaatgtgacgcttactttggcatagtttgtctcacaaatcagaatgtaacgcgtactctggcatagtttgtgtcacaaatcagaatgcaacgcatactctggcatagtttgtgtcataaatcataatgcaacgcatactctggcatagtttgtgtcacaaatcataatgcaacgcatactttggcgtagtttgtgtcgcaaatcgaaatgtgacgctttctctggcatagtttgtgccacaagtcagaatgtgatgcatactctggctatgtttttctcacaagtcagaatgtgatgcatactctggccagctatcttcaacacgccttcccacagagtgccttcctaaaattgcaactgcccgactgcctcgatcccgatttcatttgggatctcatttaacgacaaaattgccaaatctgggaagttaaacgacaacaactttctaaacgcagttctagtctgtggatttgtcaaaaggacaaaggaaatattttccaccagcattttttgattcagctgagtgatcgcatccaacatcttattgaccgtatccggctgcaaaacaggatacgaaccagttgctgtttttttaatactctgtgcaaccatttcttcaattttgggatgcacagtaacggcataaattttgttatcttcaccgacatacttgttggcaattgttcttcttaatgcttggcgaacgtattctgtcagcgtttcggtatctttggtgacggtcccataatctgccagagtttctaagatagttgataaatcattgatcggtaccttttcttccaacaaattctggaggaccttttcaacttctcctaagcgtaaaatatctgggatcaattcatcgatcacaacgttgctttgttgcttaatgccttccaataattgcttaacttcttggcgtcccaaaagttcaggagcatgtgagtaaataacttccttcaaatgagtggcgataacagtcaaaggttcgataactgtgaatccttgcaggtcagccgcttctttatcactttcattgatccacatcgcttctaaatgaaaggctggttccacggcttggatgccattaaacgggatctcatccccagtcggactaaagatcatgtatttatcaggataaatatcacccgtgccgacctcattgcccttgatcttgatagaataattatttgcatccaggtacaagttatctcggatcctcactggactgaccaagatccctaattcatgagcagtttgtttacgtaaagcaatgatccggctcatcaaactattgtcgatcgaactatcgaccagcggtatcagtgcataaccaatttcgatcgctaaagtttcgacttggaaatcggctacatcttcgtcttcttggacatcttttttcttttgtaaagccaaagtctgttttcgttgttgctcttccttaactttcttagcatcctgttgtttgatcaggaagctaacaccaagtagggctaaccccataaccataaagggaataaacggaaaaccggggacaagggataaaaccattaagatccccgctacgatccggaatatttgcggattgcgcaacgcatcttcagcaatatctttaccaaacgtactatcattatcagagcgagtaacaataatacctgaggcaattgagatcaatagtgaagggatcgaactgaccaagccatcaccgatcgacagcttgccaaactgtgataaagcttccattgcgctgagatcacctttcatagtaaagatgattgttccaccaatcagattgactaaaacaatgacgatccccgcaatggcatcacctttaacgaacttgctggcaccatccatcgaaccataaaaatctgcttcacgttgcaggtcttcccgtcgttttctagcctgcttttcatcgatcaaacccgagttcagatccgaatcgatcgccatctgtttccctggcatagcatccaaggtgaaacgggccgacacttctgaaacacggccggaaccgttagtcacaacgaccaactgcacgatcatgatgatcacgaacaagatgatcccaacaatatagtttttccctgccataacgtcagcaaaggcggcaataacatgtcccccatcaccttgtgttaggatcgcacgagtcgatgacatgtttaaacctaacttgaacatcgttgtgatcaaaagtaaggttggaaaagtagtaaattccaagactgagtgagtaaacatggtgatcaataatatgttcatggcgatcgccatgttgatggtgatcaaaaaatccaagactggcagcggaagcggaatgatgatcaaaccaatgatactgaccaccaaaagtgaaacgatcaggtcagctggtctgagtgcattcttcttagctgctttttgcttgtttttcatcagttactctctctcctatcaactcaaatccggttcaactttaaccagacttatattttatacttagcttcttcatccaaccggtagaccaaagcgatcaaatcagcgactggctcaaaaaactcttccggaatgaattctcctgcctcgatcttgagataaattgctcgtgccagcggtttattctcaatgatcggtacatcattttttctggcttcttctttcattttcatggcgacctcatcagctcctttagcaagcagctgtgggactggtgtttctgtcttatcatacttgattgccaacgctaaatgagtcgggttcgccaaaacgactgtcgcatctttaacttgggcgatcgagttccggaccatcgcctgatacttagctttccgctgcgctttgaccttcggatcgccttccatttgtttcatttcttctttgatctcttgtttagtcatcttcaatttcttagtccgactgaaactttgataggcaaaatctgccaaccccaaaaccaacaaaaccaaggcaatctgcatccctagttctttacaaaaattgagaataaaaaacaagatcttggcaggaccaacagaaccagcatttaaaatgtcacgtaacgtagatatgtatttgcgataacacagatatgcgatcagtaagaactttgccagcgtttttcccaggttgactatcgcatccagactaaacatccttttgaaaccacttaaagggttcaaacgtttgaaatcaggctttaatggtttagccgtaaataaaaaaccaatttgcacaaaattccccaaaaaactgatcaaataaccgacgaccaagaatggtgctgccacgattaaaaccgttaagatcgcctgcaagccaaccttaggtaggtctgcgtataagacctggtagttatccaactgctcgataaagcctgtcatataaggaaaaaacttgcctaatccaaattgccaagcaggaataaagataaacgaaaaggtcaataaagccaaagcagctgttaagtctggacttctagcaacatttcccttcttgcgcgcatctcttttacgcttaggggtcggtttttcagttttaccatctttatccatgaaataacctttcctttatcagactatgcctgacctaccgaacgcaggaactcgactagatactcatatgactgtgggattatctttcccaacaattccacgacatttggcagcatgatcaaaaagatgatcattcctacagtagatttaagagacaaacttaacatcagcacgttcatttgcggcacagaccgtgacaagatccccaatacaatatcgatcaccatcacagcaatgatcaaaggtgcagcaacattaaaagccatggcaagggtcttactagtcaaaatgaccacacccttaacacttgcattcgtcaaagtggcggttcctaaaggaacaatcgtaaaagatagcatcacagcgcgaaacaattccagatgcaaatttaacatgaagaaaactgccagtgccaaccagtagtacatccgaccaaattgtgaactggaaacttccattgtcctgtcataagcctggcccatcgaaaaaccattttgaaaatcgatcagggaacccgccatgatcacagcttgaaaaaccagttgactaacatagcccatggcaagccccaataaagtctcctttaaagccgccaaagcgaagataaccacactcatcgccttgaccttgccaactaaaggaatggcagcaactaccaaactccccccaacgatcagcttagcagtattaggaaaacttctttgtgataaaatcggcgctgtgaccataaaagaaaatatccggcaaatcaccaaactaactaattgtacttcggccactgacgtcacacccccgagatcaagcggaagatatattccgtgaattcttttagcgttgtgatcataaagtttccagccaagatcagggtcacaaaaattgcgaccaacttagggacaaaactcaaagtttgttcttgaatctgggtcgtagcttgaaagatactaatgaccaaaccaacgaccatcgcaactatcacgattggacctgaaactactaagattctgatcaccgcttcacgcatgaccgtcaagactaatgaaatagacattaagctccccctctaactgaaactatgaaccaacgattcgactaacaagtaccagccatctaccatcacgaataataataatttaaacggcaatgagatcataaccggcgacagcatgatcatccccatcgccatcagcacactcgagacgaccatatctatgatcaaaaacgggataaatatcaaaaagccaatactaaaggctgtccgcagctcactaataataaaagccggagtaagtgtcgttagcggaactgactccacatttttatagcgatgcttgtctttagaaacatctaagaacaatttgacatctttttttcgagtttcttttcccataaattccttaagcctgacctctgaacggttgaatgcttgtttttcagtgatctcctgccgactataaggttggatcgcttctttatagatatctgtataaacaggcttcatcgtaaacagggtcaaaaacaaagccaagccaagcaaaacttgatttggtgggttttgctgcgttcctaaggcacttctagtaaatgaaaggaccatgatgatccgtgtaaaagatgtcatcatgactaacaacagcgggaccacggataaaatcgtcatcatcacaaacacattaacgatctgcgacgaatttccgctctgtccactattgatcaaatcagtaatgccacgagaaacatcatcgaggccagctgcatgcactgaaactggtcggaacaagcaagccgttaaggacaacccgctcagtattttactttgctttttcgtagtcattacttctttctcttattctgcagcttgatcgtcttttgcttgagaatggccgcaaaatctattttttcactcgcttgatcatctgaactggtaaataattgctcaacctcttcttttgataactcagagatcaccgtactgccttgttctgccaagctcatcaagtaatagcgctcgatgacttgcacgatcccaagtgcggaagtttttgaaactgggattttcttgataactcgaaattgccgatcctgtggagcaacgaatttctgtaagtattttaaaaataagttgatcaaaacgatcacgataattaatccaaccaccattttgatcaacgacaacgttaactccatttgaatactcctcgtatgatttaacttattggatcacaaaatctgtcacataaacttcttgcactattgaactgccataatttttattaatagcctctttgacttgttctttgacctcatcgatactttgattatttttcaataaatctgcggccctttttggtttcaaaacacggatcatgctgtcacgcactaaaggcatgtctttttttaatgcttttgcttgatcatcgtcagccactaacaaagagacctttaagcgtaaatattgtggatcagctgcatcatccgttgccaaattaacaataaactttttgacgtttaccagacgctgtcttttagaaatggcagctcctgtttgcactttttcagctttaggttttgcgtcttgactattaaagtacttgtcggaaatgatcgtgccggcagcactagccccaaatgctaaaacgactactaaaacaataagcaatccccatttgatgccacctgctttagtttcagttgtttctacttcttcattcttcttcattgtttccctcgttattcccttcaaaaagattctcaccagaaaaaattcggtgacgatattctatgatcgcttccctaatttcaaacgctgtgtctctaactaccagcgttttcccatcgacaagcgtgattactgtatctggggtttcatcaattcgatagatcaaatctgggttcaaataaaattcttttcctttaaatgaagttaacaaaatcatgaacctgccccctattatttatcctgtacataaaataaaaattttaccttacaggttctttttccccttttgatcaaattgctgcgctcactattctaggacagctcctcaagccaggactttccgtctaaccaacttccacacacaatgctaaaaaacgcattatggcctagaagtccgttagtactcgagtcctacccggcttacctcgctcactatcttaggacagctcctcaacgcaggagtctgcgcctatctagtttaaacatcacggtgccaaaaacgcaccatgatgtctaaacccgatattgctcgtctcctaaccgcgttgtttcgctcactattctaggacagtttctcaacgcaggaatctgcgcctatccagtttaaacatcacggtgccaaaaacgcaccatgatgtctaaacccgatattgctcgtctcctaaccgcgttgtttcgctcactatctctttaggttgatcaattcttgcaacatctcgtctgacgttgtgatactccttgcattggcctgatatgctctgcttgtaacgatcatgtcagagaattcttgcgctaagtcaacgttagaatcttccaatgtccccgctaataaagtgttggtcccatctgtaccaggtactaaattattggcattaccagaatcctgtgatatttcataagtgctgttaccgatcttgcttaagccggctggattactgaacgtagcaatcgacactgtaccgatcacttcatcttccgcgccataacgcgcagtaactttgccatcaggaccgattgaaacgtgaccttcaactaacttttcaccagctgcattttgagctggtactgtaattcgagttaacgctccgccttcctgtccgggagcatagcccatcacacgtaaaccatcagcattagtcaagttgccattagcatcgatcttcaaagcaccgttacgtgaataaacctgaccattattaccatctcgctcaaatactaaaaacccgctaccattgatatataagtccaaagcacggccagtcgtgttttgaataccttgacccatgtctgtatcgatcgcaccgacctgaaccccaagtccaacttgcttaccatcaataccgccaacggttgcacgtggtcctgaagcattcgcagttgtctgacttaaaatatctgaaaagttagcacggcttgacttgaagccgatcgtgttcgcattagcaatgttgttggaaataacatccaacctggtttgttgactcttcattcctgaaacacctgaatacaatgaacgtaacatttaaaattcctcctatttgtgtagcatctttttaaattttgctattttttaatcttttggttctctaacttctttgatggcacccatttcatattccgtaccgttgacggtcagcttggcaataccgccagtaaagttgactttatcaactcttccttgcttttcattgccttgttcatcaacaactgtgacatccttgcccattaaattgaaagcttgttgttgctgccctaaaagcaaagaattattcatcattgtcgacatattatttaattcctgtaaggtagcaaattgtgccatttgtgaaatatgatctgtaccactgctattggaatctccatctccggtcatggaagggttagacattgatgtcgctaagatcttcaaaaaatcatccattgaaagtcccaaagcatttttagcagcaccgttttgtgaagtactttttgttatctcactcgaactgccaagactgtttgcttgtacaccgcttaaattgtccatgaaatatattcctcctttgatcacgcatactctgagacgctcaaaccaacaaactgatcgttccgtgcttgatttgttcttcgcctggcaaatgttcttcactgaccacttgtgtcctcgtcttgtgcgaacgtgcaaatcggcgttgctgttcttgctcattttgcatgaaatcaccagctggaccatctcgctgctcgcctaaaagttcagaagtttccgccgtttgtctcacagtttcaacttgtttcaatgttttagtcgttggatcaagctgcagctgctccatgatctgctctaatttatgtgtgattttttgtaacatatcacgtgcagtactattttgaacttcaaattctaggctgactgcctgttcattcgtctttaccgcaactttcatctcacccagattagccggtttcaaattaaaaactatgctctgggtattgcccttactggataacaagcttttctcaactactggagtaagtgctttttgcaaatttctcacgacctgctcgaccggtctagttatcgttgttactttttgccccacattagcttgcgtaactgtcgcgcttttttgttcaactacgcttaccatacacgttctatctgtaagctcactaaaatctatgatttcagctgcttgtttttgtcctgctagcgaagctttcgtaccgatcaagatttttgaactaactgataaaatttccgctgactgttttagcgacgatactgaaagctcgtctgccatcgctgcaacttcaggtgatgttttaatttcttgtttacccagctgccctgctttagaaactaacgggctctcaatgatctttgtaggttgaaccgactcaacttccagatcagtctgctgagcagcttcctgcttgatctttgtgtccgaactcacaaccagatttattgtcgagttagattcttgaatagcctggctttcaccagctgacttagaagttaccatactaacaaagtttgctatctgttccttcaaggtcgcttgctgggttgcagacatttcatccaagtcaattacgctttgtgccggattttcgccaaattgctcggtttgttgtggtgcaacgtcattgtctgcaataatttcggctatcggtcctgccttggcttgctttaagtctagtggaggagcagcatccttaggtaatttttcattttttccggcgttatcattttcttggagcggttcgactgcttctgattggtcatgctcgatctctagtaaaatattttgctttttcaaatgatcgctactgctaactaattccttgagtccttccagcaaatcaggcgatatttggacttttccttgcttgaccaagtcatccaaagaaactgtaccgtttactaactgttggaacgttttcgagtcaatttgcaagacttgctctagctctttttttgtttgcgaatcagtagttttaatatgtatgttaagcatgtctttagaagtctctagtcgatttttagcctttttttgtctgaaacctttatcatcattaaccgcaatttccggcttatcttgtgctaaaaaagcctgaaatttccccgtttgttttttggttggcttggctttagcaacctgcaaaccagcaattttcttacctgtaactaccttttgcatttcattgtcctcctttcaaacccttgctttaacgtcaaggtcaagcgatatttacattttgttgtggccggtgaaaatcatccaactgcttttgttcctcatgggctagctccttttgatattgtgcaagctgctttgttttaagccgctctaatattttccgttgtttctgtgcttcgatcaattcactgcgaatttgctctttttgtgcttgcaaccccaacagttgatcgtgacaaatcatgatctggtcgttaagagcttgaatatagcgtcgtgtgacttgcattctgctaactgaaaattgtggagtttccatcatgctgtctttttcttgcatgacttgatccaattcagtatttttctcgttttccaggcggttgacttcagcaaaatgccccttgacctggtcttcaacttgcaaacgatattccagcactttttgtaatgaaaaattaaattcttccatccctgatctccctacccttctgcagtgatccgaccgtcacctaaaacattattcgaagcaaacaactgctgcaatctctcctctgtatctgtgaaacttgaaaattcatccacggcttgttgcaaaaagtcatcgatcggtttgtgcagctgcacagcatagtcgatcacaggatttgttccgctcttatatgccccgatatctatcaaatctttcgcatcagcgtatgttttcaaattttcacgcaattcactggcatggatattatgttcttgagagaccaacgatttcatcaaacgactgacactaggttgaacatcaactgccggataatgattttgggccgcaatttctcgcgataaaataatgtgcccgtctaagatcccgcgaactgcatcagcaatcggttcgttcatgtcgtcaccttcgaccaagaccgtataaaatgctgtgatcgaacccttgtcagacattccgcttctttccatcaacttgggtaattcggcaaaaaccgaaggagtataaccccgggtagttggcggttccccagttgatagaccaatttcacgttgagccatcgcaaaacgtgtgaccgaatccatcatcaaaacaacttttttgccctgatcacgaaaatactcagcaattgccgtggccgtatatgcacctttcagccgaactaagggcggcatatcagaagtagcacacactacgatcgacttagcataaccttcacccaagtctttttcgataaattctctcacctcacggccacgttcaccgatcaaaccgatcacgatcacatcggcctgacaatacttagcgatcatccccagcaaagtacttttaccgaccccactgccggcaaagatcccgactcgctgtccctcgccaaccgttaataatccatcgattgctcgaataccagtcggcatgattttttcaatgtcttgccgtttaaatggatctggggcttcctgcatcgctggatacccgaccatttcagactggtcaagcttggaacctttcaatggacgtcctaggccatcgaaagtatgtcccagcatttttggcccaaccttgacttcaagtgtcttgccagttgcagccactaggcaacccggcgcgatcccctctagctcatctaatggcatcaataagaccgtttgtttaacgaatccaacaacctccgtcactgtcttttttcccgcttttttcgcatagacctcacagacttcaccgacgaaggcttgcaaaccttcgactttgatcacaagaccaacaacttcgctgactttgccgtataccgaataaaaaggatattttttcgcttggtttaaataatttttaaaggggatctttatctttgtcatttatttacctcataattgttccagaaaaccttgtaattcctttttaatgtcaatatcaactaccgattcgtttgattcgacacgcagctgcaaagcatttaaactatcatcatcaaaaattatgtaacgcagatcaggaatttcttctttgacctgctctaacttagtggtcagtgattcatgataagcggagttagcccagaccatcaatacttcatttggtttttcgagttcgaataataatggactcaaaattgcagtgatcttttctggcgttagttccaactgcgtcttcaaaataatttcggccaactgtactgcaaaagaagtgatctcatcctgtttttctgccaggtactgttttgactctgccagactttgctccacgttatcttgtgcctgcttgactagaggtgccattttttgttgtccttttgtcacagcctcctggtatccatctttttttccctgagcataaccagaatcataggcttcttgcttgatttctgctgccttttgttttgcatctactaacatctcagctttcagctgttttagcttttgctggtaagctgccgtctgatgtgctaatttagcgtcaagagctgttaactgtggatcttgcttttttatttgaggaacaaaatctgctgtctttataccaactttcttaccatgcaggggcattgcctgctgtttcaaaatattattagacaatgctgtcttgacctcctcgaccaatatagatctcgcctctttcgtctaacttccgaataactgcgacaactttttgttgtgcttcttcgacagctgataatctagttggacccataaattcaagatcttctttgatattttcaaccgcatgttgtgacatattaccgaagataaagtctttgatacgatcatcgctgcctttcaaggccagctctaatacatcgtttgtcacatcacgtaatactttttgcacatccaacgcttgcaaagtagtaatatcttcgaaagtaaataggttggcctgaacttcactggccaattctggctgtctgctttccagaccggccaagatcgtcttttcagtactgcggcccgttgaattcaagatatcgaccaatgcgccgacaccaccgatactctcacgttcaccatcaaccacattggaaaacttatcttccataactttttcgatccgctgaatcgtttctggtgaagtggccgaaatcgttgccactcgttcagctacatcagattgcaattcatctggaaattctgacaaaacactggcagccttctcagcctgcatataacacaatatcaaagcaatagtttgtggatgttcttctactagcaaattaactaattgctgctcattagcacgacgggcaatgttaaacggttgttcccgcaactggatcgtgttcaaaacatccagaacttctttggctcgttgcggccctaacgaattaactaaaagatcctttgcgtagtcgatcccaccatccaaaacatattgtctggctgtggcagtgtcgacaaattcatcgatgacagcattcttttcttctggagtcacataatctgtattagctatttcataactgactttttgaatcatactgtcaggtaaaagtttcattacctgggaggacgcttctgaccctaaagagatcattaagatcgccgctttttttactccactcaattgagccatctcttatttcccctcctagtgatgatctttcatccaagctttcagcaattcagctgtaactgctggattagtctgggcataatctttagcctgtttatccttagcttgtctttctttgacttctggtttttcctgcagaggtactgctttttcctcttgttttgcttccggtaacggctcactattcgctgaagaagtaggtccaggttgtggtgaatcatcagttacatcgacatcataatcatcatcgtagtagtcatcatcgtcatcttggcgtttcttgcgaatgatcaaaaaggctgcgataccagcgattgcgatgacaccgatcggaagggcgatgtaccaccacggcacattattcttcaccgtcttagtcttatgaacttttggtgtcgtgtctggaacatctaaagcttgaacagtaactttatcaccacgatccttatcgtaaccgatggctgaacgcacaatacttttgatctgcgcctgctggtccccactaacatctccacgaatagcaacagaggtcgttaatctcttcacagttcccggtgcgctaacttgcttagtcacatcagtatctaattcattattgatcgtccggctatatgaagcgccattatcggtattatcgccagttacgttagagacattatcatcggtttgaccagtctgtgcttgttggatctgttcttggttcccattagcttgaacattttcactccgtaaatttggattgctatatttcgtagtcttgcgttccagtgcgtcaaaattaaggtcagcgttaactgcgacgctgattttgtttccatcagctaatgggcccaaaacacgtgtgatcttcttttcaagttgtttttcaaactgtttttggatctgcatatatttactgttcgcacctgtcagatcatcattgtcattattcccatcagccaatacatttccattactatcaacaactttaacgttttcggctgttaatcccttaacggcacctgtggtcaactcaacgatccctttaactgctgaatttgagatcgtgttgccattcaacgtcaatgcaaccgatgctttggctttttttcctttggcatcatcactaaagacatcatcatcaggcatcgttaacattactttagcttttttgacagcatttaaagaaccgatcgaacgttccagctcaccagtcgttgcccgctgatacatgatcttacggtcttcatcagtggtcatcatgctggtatcatcaaataactcatagccttgtgaactatcgggcagtttgttatcgacggccatatcgatccgatactggtcgacttttgtcttatcagctaagatcgttttaccatcatcttttaacttgtacttgatgtcttgatcttccaaatctttcgtaaccgtcccagcgtctgcgtcacttaaattcgaaaacaaaacggcatactcaactctggtgttcagataatatacgatcccaccagcagcaagtatgctgatcaaaccagctatgatagcaatttttactaaacgatttagattagaccatttgtcttttaagtttccaaaaaagtcctttactttatccacttccaagcccccactacacgactaaaactgcatgttcttaagatcgttataagcttccaaagctttattacgaacttgaactgcagtctgtaaagttaattgactttcagtcatattgatcatgacctgccctaagtcatcttgttttccactgatcatatcggtagtcgactgatccataactttcatgcttgaatttaaaccggataaagcatgatccaaataatcaccgaatgttttaccggcgcctttaactgtctgatcagaattatcgagtccagtaactttgcgcagttgagtagcataattatttaagccgttaataccattgacctgtgccattttatctctcctaattttctgatatttctagtgccttactcaagatctgcttattgacctgactcgaagcaacatttgcttcgtaagatctttgcgattggatcaagtcgatcatctcatccgccaagttaacattcggtaaatgaacataaccattttggtcggcatcggggtcatctggtttataactcaacttctcagtttgatcctgtgcaatgccagtcactcttacaccggaactctgtcgtttgttggcttccatgatatttccattgtctgcttcgacttgacgtaaattttcagcgaattgaactgacttccggcggtacgggccaccttccggcgttcgtgttgtattgacgtttgcaatattagttgatgtcgtatcaagctttaaccgctctaaggctaagccgctggcattgatctgcaatccattaaaaatactcactctgatctcctcttctccaatttagtcttaccattaatgattcaaaacataactcatcatttggtaacgccctttgagttgtgatgtcaacgcgctataattcaaaccattttgtgcctgatttaacatctcaacatctaaatcaacgttattgccattttctttaacagccgtatcattgcgcacgctttcatgcggttcaattgccccgcctgcttgcatatgcattttagatgtagtttttaggtgtgtttcttggtccaaagcattattcaaaacactttcaaactcgattcgtttagctttgaaacccggcgtattgacattagcaatattatttgcgttcaattgtgctctattagaagaaacgtttaaagcttctttcattaagccatatgtattttccaaaattaattacacctattttctttgatttaacactaatattttcaaactttttatatttcaattttcatagtagttgcttgcagccaagatgtcccctttatcaaactttttctatatttttcacagcattataattttagctgttaacatactcacaatcaagttaatttttaagttattttcaattaaaatataaaatttttaatttatctttcgccggatttttaaactatttaaaatatacgcattttattcatccacaaatgttatagaattaaggcaatcaagtaagtgttttaatcctaataaaaatagtgggtacaataaaatgacgatttattatttaaaaccagaaaaaacagtcgatgaaattatcaatacattgcacgctagtgttgctagcatgcaatattttgaaacgctagatatgatttgcgaaaaagttgagtttaatcttgatgaagccgcgctattacaacgaattaagcaactagccgatgattaacgcgcagatttggaaacccttcattcaatcggggtttcagaaaatgatatcgaccgtttaaaagctgcaggtttattattattcgttcaggataatgagattccacaaagctatgtgacgctcagtcggaaagcattagttggtttgcaagagattgcagcggcttatgctcaagagtctacacagctaacaatgaatattgattcaaaagaaattcaaagcttaaaagcagcttcagataagtttttcagaaagtatcaataagaaattgaaaaaagcccatcgacatttatgtcgatgggcttttttgtttgccgcaaagtagcgcttggctatgcttgaacaaactttttaacgggtcctaataggtctgggttgatttgtgcacgaatcaacgtgccatcttcttcatagctttgtttagtgatattggcacgatcactgaggtacgaaacagcttgcccttctgtgtatgggactaagaagtcgagcgttgggtattgttcaaagagttgtttgttaattaaggcaatcaatgcatcgattgctacttcgtcgcgagctgaataaacgatttggtttccgtctacttcaggatagcgcgtatctggtttcaaatcagctttattgtaagcctcgatgactgggatatctttaatgttgagtgattcaagggtttcttgtgtcgtttccatcatgtccaagtagtttggatctgagtaatcaaccacgtggattaaaagatcagcactcgctgcttcagctaaggttgatttaaaggcttgaattaagtgatgaggaagttttgtgacgaaaccaaccgtatcactcaacaggaatttctgttggttggggaggacgatttcgcggacactcgtgtctaaggtggcaaagagcatatccttttcaaaaacttgtttttcaggtgtatcggggttcaaccgttgtaaaattcgattcatagtcgttgatttacctgcattggtgtacccgacgagtgcgacaactggaatcgcatttttcgtccgttgacggcgttgtacgagttgttgttgatcgattttagcaagttcggctttgagcttcgtaatccgtttttcgatgagtcggcgatccaattcaagttgggtttcacccgccccacggttcgcagtacccccgccaccttgttgatccaacttgttttcagaaggatggaggcgtggtaattggtatttcgcttcggcgatggccacttggagttgcgcttcttttgttttggcacggctagcaaagatttcaagaattaattgcgtccgatcaagaatgcttattccgagttctttttctaaattccgaatctgtgaaggtgaaagttcatcgttaatcaagataatgtccgcatcttcagcgacggcgcgttctttaatttcttgaaccttccctttaccaaaataagtggcgtgattagcttggtcgatattttggcgaacgtcaccaacgacttctaagttatcggcacgggctagttcgcccagttcgcgcattgtatagtcaaaattaacttggcgttgactaacaccagtgattaaaacctttttaggttgcatataagtttcttccatgagatctcctttttgtgagagtgcgtcttcaaatggtcagccgttgaggattagcaatatctcgtaaatgagcggcaacgccgattgtttacgagatggcgctaaacgcagacggctatttgaagaaagcacgtttaagataagagtgcggcaccggcggttatctgctgaggattagcataggcagacgaaaaaccgatttgttggttatttggctgacgtagctaaccgagagcagatgcctggtggagcacgtttcaattgaaaaaaagggccatggcaaaaatattcttttgtcacagccctcagttaattaaatttaaaaagcgaatgccaacagaaatagccgcaaaatggccacatgattattcaattgtgattgcgattaaacaaacgttagttgacatgttgttgacgctcctttgatgtgaaatgggtggttacccaccttatccgttaagtgtaccatgaaagccattaaaaaccaaagttcgcctttagcgtgtacgccaataattaacactgttgtgggtgcccagcgtaattttatggtagaatgtaagcggttatcaaaatacataagagaatcgattgggggattgacgaatgaaaaatttagcattacttgatgttggtggcactacgattaaatatggtttatgggatggtgcggcgcaacaattgaccaaacaaggggctgttgccacaccaaagtcgttgaatgcgtattatgatgtgctgacgcagattgtggcggagtttaaggctagtgaccaagttgttggggtcgcaatgagtacgccgggtgcagtgaacaaggcgacgggtattattgaaggggccagtgcgctcccttatattcatcattttgaaattcaagatgaacttgaaacgcgctttgacttaccagtcgtaatggaaaatgatgcgaattgcgcggctttagccgaagtcggtagtggggctgctaaagggctaaaaaatgtgttgttcatggtaattggcactggcgttggtggttcagtgattgtcaacggacaagtccaacatggtcgccatttattcggtggtgagtttggctacatgatgatgaatgatggtcggattttaagtgaagtcgggaccgccgttcacatggctgaccgttataatcaagaggcacatactaactactcagggcgtgaagtttttgaattggctgatcaaggcgatttactcgcgcaaaaggaggcacaggtgctctatgataatctcgcacaagccatctataatttacaatatagttttgattcagaagcggttattttaggtggtggggtgtcgcaggccgatttcttggtgccaaatattgaaaaagctttacaggaaatactcaagcaagtcgatattgcgcctttcatgccaaccattcggacgtgtcagtatcataatgatgcgaacttgattggtgcaatggaagatttccgccgcacatatccgaatttagttgcaaattagactagtaaagaccgctttcaacatgtcataataaatattataaatgatattaggaggcggttaagatgcccacggaaaaacaagcattaaatcaaacgattggatttaccgcggcattagccactgtgatgggaacggtcatcggtgctggtgtgttctttaaagcggatcctgtgacgcatgcgaccggctccaccgggctgacaatgcttgcatggcttgtcggcggcttaatcacaatttgtgctggattgacagctgttgaattagcagctgcgattccagaaactggcgggatgatgcggtacatcgaccatacttatggtagtttagcggcatttttattaggttgggccgaaacaacagtctactttccagcgaacattgcggcgttgtcgattgtttttgcaacgcaatgcattaacttattcagttggtcagctcactggcagattccaattgcaatcatcgtcggactcagcttaacaatcttgaatttctttggttcccgggttgggggactattccaatccttcacaaccgtctttaaattaatcccgcttgcgattattattgtattcgggttaattcatccaggcagcaacgccgttcatgtgtcattatttgacgtgacccggtcaaatggctcggggagtttcctgtcagcgctgggcagtggtgttctagcaaccctctttgcgtatgatggctggattcacgttgggaatattgcgggtgaattgaagcatccggaacgcgatttgccgcggtcaattttaattggtttaacaggaaccatggttgtctacctcttagtgagcgccgtcttcgttcttgtgttgccaatcaatcagattgccggcaatccgaatgcggcttcagaagtggctcgagtgctatttggtggtgtgggtggtaaaatcatcactattgggattttaatttccgtctatggcgggattaacggctacacgatgactgggatgcggattccttatgcgatggcgctcgagaatcggttaccattcagtcgacaactgcgctccctttctaaaacaggcgcgccggttgtcagtggtttagttcaaattagtatcgccatcgttatgatgttcatgggtggcttcaatacattgactgatatgttagttgttgtcatctggattttctatattctaacgtttatcgctgtgttcattctgcgcaaacgtgaaccagaattaaaccgtccgtatcgcacacttggttatccagtgattccagtcatcgccattcttggtgggattttcatcgtggtgaatacattattcacacagacgatgttaactttaatcggaatcggaattacattactcggattgcccttttattactatttaaaaaataaatatccagtcgtttaacacaaaaaacgaagttcgtgaattaactgaacttcgttttttttgtggccaaaaaccaattgtagcaacggatagacgaaaaataaaatagttgcgcaaatgaattatcggcattaattgttgatttttataaaaataaactaggtcataactcatgagttgtgaccccttcgcatcaaaggttcttattggcgttttcagaaaatgcgtaaatttatctacaaattaaaataatccgaaaaacatcgctcaaacattggttttaaaaggtttttaatgaacgattgacaattattgtcgcgtgaaatatacttgcacataaccaaacaatgatataaactaaccttaactgctgcttaatcaagttgaaatgagtcgctagtttgttttaaataaatgattgtcggcttttgactagccggtggtcatttattgtacataagttaaaactatattgaatggacggtggagggttgcagatgccagataataaaagaatattaacaattagtgagtggtatctggagtgtcagaacatcacgactcaattgaataaaatgagcgaaaaacatggcttaagttatgatcaatttctcgtgttggaacagattgtggaactaggacggaacaccccaggccaaattgcagtcgtatttgggacctccgcaccagcggcttcccgtaaaatcaatacgctacaaagtaaaaagtttattcgcaaaattcgtgatatggaaaatgaccaacggaatgtttggttagaagcaactgaagaaggcctccgcaagtacaaagcgctaaaaaaagatattactaagcatactggcatcaaagcaacggacttggagtacttacggcagataaatcaaacaattatagaataaaaaagggaaaggccatcatctttagatgatggccttttttaataccaataaggtaaatcgtaatcattttatgcataaattggtataattgtgaaagaatataaaaagttgaacttaaggggtggagaaatggcaacattaatggacgtcgctaagcgggcaaacgtttctaagatgacagtttcgcgggtgattaatcatccggaacaagtaacagatgaattgaaggaattggtgtatgccgcaatgaaggaattggattaccgtcccaatttaattgccaaagccctagtcagcaacagtacccgaatcatcaaattgtgtatcttggaagacatcgacgttaccgaaccatattacatgaatctaatggtcggaattgctaaggcacttgacctacatcagtattcgctgcagttagtaactcggcgtaactttgatatcgggaattgtgatggctacattattacgggattgcgtgaaagggatgttgcatggattcgcgatctgacaaagccagtcgtcgtttttggggagaatcagtacggttttgattatgtggatacaaataaccagttggggacctaccttgcagcgcaattagcattagagcgtggttatcgccagcttatttatattggaatggcgagtgaagaagcgtttgaaaaatcacgtgaagccggttatttacaattaatgcatgagcagcagcgtcctgttcagttacaccattttaacaaccatagtcatttgaccgaagcctacatcattgaacactgggcgcaattcaaactcgagactgcgtttatttgtgccacggatcgtctggcaattgggattgaacgggggattgcgtcgtgtggtggtcatgtgccgcaagagtttgggattacaggatttgatggggtctttttaaatcaagttgcctctcctaagttgacaacgattaagcagtccatcattgaaatgggccgtgcatgcggagagaatatcctcaagaaaattaatcaggagtggattgagcgaccattgatattcgaaccacacattgaaatgggcgggacaattcgccctgtgctaaaagaacaatcggaataagcataagaaaactgttaccggtaacatcaggaaaacatttgtaaaagcgttttcaaagtacgacaataaaacttgtaaacagcactgataaaaatttattggaggtcgttatagtgaaaaagatgtggaaaaagctagggttagtttcgttattggctggtgtaacgttaacattggctgcttgtgggagcaagagtgcggatggcggcaatgtgaaaatcacaatcctacaaggaaaagtggaatccaacaagcaattcaaagcgattgcgaagaagtatgaaaaagcacatccaaacgtcaagattgaaatcacatcaatcggtggtgggacacagtataatcccgttttgaagacgagaatttcatccgggaatgcacctactatttttagtttagatgggccagcatcggttaaacaattcaagaactacacggctgatttaacggatacaaaagctgctaaggccgctattccaagcacactagatactgttaagtcacaagggaaagtttacggcttgccatttaacattgaaggctatggttttgtttataataaagctgtcttcgaaaaagccggtatcgatccaaagagcttaacgacttacgataaattagaagcagctgttaaaacattaaatgaacaaaaagaacaattaggcattaaaggggtctttgctttacctggtaaggaatcatggattctttcagatcatttgttgaatgtttatctaagtaaagaatttgatggcaatgcacaaaaattgtatacctcaaagaaaatgaagtttgaaaacaatgcagaaatgaaacaaatgattgatttgcaaaaagaatattccgttcaaccagtcatgcaaatggattacgcgggacaagtgaaccaaaactttgctcaaggaaaagttgcgatgattcaacaaggcgactggatttacgaaaccgttaaccaaattgatgcgaaattcgctcaagacgggatcggcatgattccaatgccagttaaggaacaacaaggtaagatgcctgttgggacctcaatctactgggcagttaataaacggaagagtaccgacgaacaaaaagcagctaaggacttcttgaactggctatatacgtctaaagaaggtaaaaaagacgttgttgagaaattacatttcgtacctgcttataaaggttacggtgatgtgaagatgccagatgcactcacacaatcggtctatgattacagtcaaaagaaagcaacattcggctgggttttcccgggttatactggcacatcatgggatccagacgttgcccaacctaacctacaaaaatatctatcaggtgaccaagattggcaaaagactgtttcaaatatgaaggacggttggacaaaacaacaaactaaataaatttattcaattggataaaacaaaaagagggtattgaaatgaaaaataagagtttatcattttggttatttttaacccctacccttgttgcattagcattagtcgttttcattccaatgctggagggcctattctattcattcactgactgggatggactctcttttactaaggtcgttgggtttaaaaactacatggccttattacaagataaagcattcggaaacgccttttggttcacggtagcttttgttatcgtgaccgtcatcttgctaaatgtaattggcttggggttagcattacttgtgacacagaaatttaaaggcaacaatttcttacgagcgatcttctttatgccaaacatgattggtgggttaatcttaggatttatctggcaattcattttcacgcaaggctttagcgctttgggatctgccttacacatgactgccttccaaaactggttaacgaattcactaactggtttttggggcttggtaattgtgacggtttggcaaatgagtggttacatcatgattatctatattgcttacttgcaaaatattccaagtgaagtgattgaagctgctgaaattgatggtgcatctgcttggcaacgatttacgcggattacattcccaatgatcgcgccagcatttaccgtctgtatgtttttaactctgtcgaatgggtttaaaatctacgatcaaaacttgtcgttgaccaacgggggaccttacaactcgacccaaatgttggcgatggatattgtgaatacagcctataattcgagtgatttcgcactcgctgaagctaaagcaatggtcttcttcttgattgtcgctgcgatttctttagtacaagtcttttataaccgtaaacgggagggcgatttctaatgaataagaaaagaaatagttggatcggcgtcctcggtgtattgattggtcttttatggttattcccattctatatgattctaacgaactcatttaaaacaccaaaaggcatttttgcctcagtattgtcgctgcctaatccattcacgaatgtgaactatggaaattcgtttaaagcattgaatttcattagttcattgaccaattcgctcattattacagtctgcagtgtgttgctgattatcctatgttcttcaatggcagcctatgcactgcaacggaataaatcgaagttgagtagcagtttattgctgcttttcatctcagcgatgttgattccattccaatcagttatgattccgttgacggcaaacttcggtaatgtgcatctgttgaatatgtacggcttgatgttcatgtatttaggcttcaactgtagtttatcgattttcctatatcaaggcaccctttcaagtattccgattgcaatggatgaggcggctgaaatggaaggtgccagtcggtggcaaatttattacaagatcatcttaccaatgttgagtccaatgactgtgacggtcgctattttgaacatcattgcgatctggaacgattatcttttaccatcattggtcttaccacaagcgcaatatacgattccactacaaatgtttaatttcttcggagaatacacgaaacaatggcacctcgcattagccggcattaccttgtcgattattccggtcattgtcttctacttattcgctcaaaaatggattatcaaaggtgttacagatggcgccgttaaataattaaggaagtgttgatcgtgaaaaagcacagcgaaacaagacaaacgttattggcagccgggaattggttatggtcgctttttaccatcaaccttgcttggtttggaattaattttcctgtcattctgacactgattttaacgtttagtatgccaaacggccgagtaatgattcccggtgcagttgtgctagtgttaatgctcagtttgtttacactaccaagtttagtcgcggtttttagagcggtagaccaatggcaagttaacggtgatggtaattatgcacgcgttgtgttaaaagggtggcggcaggcactgccagactttttagtgaatctgacgttagcgacggcattgatgatcatcgtgttgttactaaaagccagtgtaggcgatattttagttcgtagcggcttattggtctggtttggggcgttattgctagttgtcgttgccagaagctacttggtcgggttagcgcgccatgatgttaccttaggcggctttatcattgccaatgggggcaaattagtgctagccaccggcgttttcatcttgttgatgggcattaatgtctttttaaaactcgcgtttatgattcttgttgcgagcgtttcgttggcagccttcattagctatcaattattgaacggtgcaccagttaaaaacgaagtaagggagaaatgatcgatggtcgaaattaatttaaatcatatcaataaaaaatattcaggaaatgataccaattctgtcacagatttcaatttgaaaattgcagacggtgaattcatcgtatttgttgggccatcaggctgtggtaaatcgacaactttacgaatgattgcaggtttagaagatatctctgatggggaatttaaaatgggcgaccgagtgatgaacaaggttgcacctaaggatcgagatatctcgatggttttccaaaactatgcgctctatccccatatgacagtcttcgataacatggcgtttggccttaatattcgtaagaatgataagcaagataccaaaaaacgggttgatgccgcagcagaaatcttaggtttatcggagtatttagatcggaagccatcttctctttctggtgggcaacggcaacgagtagctttaggacgagcaattgttcgtgatgctaagttgttcttattggatgaaccattatcgaacttggatgccaagttacgggtgcaaatgcggactgaaattgcgcaattacatcaacgcttaggtcgtaatttcatctatgtgacgcatgatcaagttgaagcgatgacgatggctgatcggattgtcatcatgaacgatggtaaaatccagcaagtcggcaagccaactgaactctataatcatccggttaataagtttgtggcaggctttatcggttcaccagcaacgaatttcttcacggtaaccttaactaatgggcatctagtgaatgacgatggtctaaatatcgcagtgccagaaggtcagttgaaacagcttattgccggtggctacgatggtcaacaagtgatcttggggattcggccggaagatattcacgctgaagaaattaccctccaaacattcccagatgctaaaataacggcagaggttgtcgtttccgagttattaggggctaacacaatgctctactcaaagattggacaaaccgattttatcgctgaagttaattcgcgggattatcatgaacctggtgatcgggttgagatggtgcttgaaatgtctaaagcacactacttcgacattgcaacggaagaaacaatctattaagcgctgctaaataggcggaatgattttggctgacgtatcggagggaacgaaatggagagaatttttgaagtcgatccgtggcagattgtcacgcatcaactagatcgtaaacataaacggctacaagagagtatgacgagtatcggtaatggttacatggggatgcgcggcgtattcgaagaggattattcaggagacagcctgcctggcatttatctcggtggcgtctggtatccggataaaaccgtcgttggctggtggaaaaatggttatcctgactattttgggaaagtgatcaatgccatcaatttcatcaaaacgaatcttaaaattgatggtcaagcggtggatttaggcaaagatgaagtgaccgcatttaagttggcactcgacatgcataatggggtgttaacccgccaattcatcgttactaaaaataataaacaagtgcaagttacgatagagcggtttgttagtatcgttcaaaaggaattatgcgcattgcgctacactgttgaaaacttggcgagcgaagcagttgagattgagattagttctatgatcgatgctgatgttcaaaatgaggatgcgaattacggtgagcaattctggcaagtgattgagcagtcagacgctgcggatgacacttatttggtcggaaaaacaatgcccaacgatttcggggtaccacggtttagtgtgggggttcaaattgatcatcaaacgacaatgatggcagatactgggcttcaagaagcccaccaagttgggcaacgttttaaacagcaattggcccctaaaacgcaattgaattttgaaaaacgagcggtagtggtgacttctcgagattattcagagttggacttggtaccaaatatgcaacgtatcaagcaggtcgttgcgcaacaaagttaccagcaattattagcggcacagacgaatcaatgggcgaaacggtggcagatggcggacgtggtgattgccggtgatgatagtgcccaacaggggattcgctttaatttatttcaacttttttcaaccttttatggtgaagatgagcgtctaaatatcggtcctaaaggattcactggcgaaaaatacggtggtgcaacttactgggacacggaaggttttgcaatgccgctttatctctcattggctgatccgaaagtgtcgttgaatctattgaagtatcggcataatcaattgtcgggtgcagaacacaatgcccggcaacaggggttaaaaggcgcgctctatccaatggtgacctttgatgggattgagaaccataatgaatgggaaattacatttgaagaaatccatcgcaatggcacaatcgcctatgcaatttataactacacacgttacaccggcgatgagacttatttgctcaatgaaggtatcgaagtgttaactgagattgcacgcttttgggcagaccgtgtccatttctcacaacgtgcgcagcggtatatgatccacggtgtgacagggcctaatgaatatgaaaacaatattaacaataactggtatacgaatttattggcgcaatggacgcttagttatacgattgaaacgctcaaaaaagtaagcgataacaaaaaagcggatctgagactttcagatgcagaactctcacaatggcaagcgattattgaaaaaatgtacctgccacaagatgaacaactcgggatctttcttcaacaagatggctttttagataaagatatccagcctgtcagtgcaatcccagcagatcaacggcccatcaaccaacattggtcatgggataagattttgcgttcgccgtacattaaacaagccgatgttctacaaggcatttggtattttatggatcgtttttcagctgctgaaaagaagcgtaattttgatttctatgaaccgttgacggttcatgaatcaagtttatcagcggcggtccatgcgattctagcggctgatctgcattacgaagataaagcggtggaaatgtacgcgcggacggcacgcctggatctcgataattacaataatgataccgatgacggattgcacattacgtcgatgacggggagttggttagcgattgtgcaaggttttgcaggcatgcgaattagcgatgaaggacaattatcattcaaaccatttctacccaaaaaatggacggcttatgaattccatattaacttccgcggccggttgttgaaaattagcgtgacggccgaccgaactgatatcaaactactcaagggcgatcgtttggcaattcaagtcaatgatgcgtcgatgatgttggaataggaggttattatggacggtgtcttattcgatttagatggggttattacggatacagcccgatttcattttgcggcgtggcgtcaattggcgcaacaagcgtttggcgtcagcttaccagatagctttgaagctgagttaaaagggattagtcgggaagcatccttgcaacgaattgtggcctttgcccaacttgatggccagtatacggtggcacaactcgcagcactggcgactcaaaaaaatgaaaattacgtggctgctatcaagcaattaacggctgccgatattttaccgggtattcaaccgttgttagtagcattaaaagcgcgcggggtgccaatggtcattgcttctgctagcaaaaatgcgccactcattcttgatcgattagctttatcagcatattttacagcgattgttaatccgaatgacgtgcaccaaggtaaaccagccccggatatcttcatcgcagctgctcagaagattgctgttaatccgcgaaaatgcgttggattagaagattcagtagctggtgtggccgccattaatgctgcaggcgctgtttcggttgcgattggtcatgcgagcgaattatcagcagcggcggttgttgtccctacaacggcggcgttaacggctgatttgttagaacaagcctttgaacagtatcaacactaattaatcagtgcaaccgagccttcgggtgtgtgttggactggtttttttaaggaggagacaaatggatttagcagcgatttatcatcgaccagatagtgagtttgctttcttatatcagccagataggctacgggtacgattgcggacggcaagtaatgacgttgaagcagtgtacctagtgtatggggatccttatatattagtcgatggcagttggcaaccgaaaacgattcggatgcagcaaggcttaataacggatctcgcttgtttttggacgattgaactgaccattgatcgccgccgattagcctatgcttttcaagtgattggtgtggacgggaccagcactttttatggtgatcaggggcctggtccaatcttacctaaaacagatgcttgttttcggatgccctatttccaagaaattgatcgggctaaggtaccagagtgggtcaaacaaacggtttggtatcaggtttttcctgaacgatttgcaaatggtgatccgacaaatgatccagatggaacattaccgtggacaaatgaggcaccacaggctcaagatttctatggcggtgatttacaaggggttattgaccatttagatcatttggtggcgttagggattaatggattgtatctcaatccaattttcatggcgccttcaaatcataaatatgatacgcgtgattatcggatggttgatccacattttggcaatgacgagacgctacggcagctgattactgcttgtcatcaaagagggattaaggtcatgctagatgctgtcttcaaccatctcggcgatcaatcaccacaatggcaagatgtgattcaaaatggcgcggcttcaaggtatgctgattggttccatattcgggattttccagtgcgttatcagccaggtcggaatttcgaagatgctacagacattacatatgatgtctttgccacgacgccacacatgccaaaattaaatacggctaatccagaggtgcaagcttatttgttatcgatagcgcggtattggattgaagcatttgatattgatgcttggcggttagatgtcgccaatgaagttgatcatcacttttggaaaaagttccgacaggtgtgtgatgctgctaaacctgatttctatattcttggtgaaatttggcattcagcgcagagttggctcagcggtgacgagtttagtgcagtcatgaattacgcctacactgatgcgattttggattattttattcataaaaaaattccgctccaccaaatggtttcgaagctgaatcgacagttaatgctgtaccgggatcaaattaatcaggtgcagtttaatatcctagattcgcacgatacgccgcggttgctaacgatggccaacgacaatcgacgcttgatgcgtcaaacgatggcttttatgtatctacagccgggtgtgccatgcctctattatggagatgagtatggcatgacgggagtggacgatcctgctaatcgtaaatgcatggtgtgggatcccgtggaccaagatcaagccatgtatcagttcgttaagcagctaattgggcttcgccatggtaagcaaaaactattgtcggaaggacagcttgagtggttaattgagccgactcatcccgacgtcttaaaaatgactcggcgattaggtgagcaacaattgacggctgtttttaatgcaggtcaaacagccgttagtgttgcatcaatgaggacaccaattctgtctgaaggggttcagcagcaaacagcagcgaccatcattgaaccagatggctttatgatttattaacatttcccaggcaataaaaaaagattcgcccatatggggcgaatcttttttagttaggctgctcgttttctttggaattttgcaaccagtggtaaaatcacgccgaggcccattaaggcgactgagacgacgatgtttaagattaattcgtgtgtatatttggctgtgccaggtgtggcatcttgtgggaagatactgaagatcgttcctaatgctgtaatggctaaacaccagaagccaacgatgatggcccatggtttgtttttaatgtatgtgtattctgatgggaatttttcactattgaaacggacccgtaagaaggcgacaaagatgaaacaagttacaaatggtgagacgataccgttaatatttaacaaccaattgaagatgtcgttaatctcgggcagaaaggcactagatgctaaaacaaaggtacaaatcccagtggtcaaccagtaaccgttgattggaaggccttgtttattggtcttagtcagtgcttttggtaagaattgtttggcagtgtcggataagaaaatccgtgtgccgccatcgagtagcatcgctaattgagcgcccatgtaaatcgcttgggtaacagcgaagatgtagagtaagactttacccatgtggaattgttgcccaagggctaagaaggcgtagtatgaaccgttcatcttcaagtcagctggtaagtggttggcatcgaagaagacgccgattgctaatgagccgaagatggttaggaaggcggtcattagagcgagggccatcatggcttttggaaaatcttttttaccatctttcatttggccaacgtatggtgcaacaagttcggcaccgttcatggcgaaaattaagaggccgatggttgagaagtaatgtaaatcaaattttggaatgaaggtgtgtgcgtttaatggatgggtggcaacgtgaccaccgttcaataaaccaacaaaggtcattaggacaaagaggatggtcatgacaaacatcgcccccccaccaacgatactgagtacctgtagagacgatgtaaacttgtgttggaagaagatgaagaggatggtaattgcggctgttaaaagcgcaaaggaagcccgtgagagcttgtcttcaagatttccgttcccagtaataatccaaaagaaggaaacgaccattgaattagcaacatcgaccaagtatggcaaactcgctacccagtaacaccaagcggttaagtaaccccaaacatcaccgcttgtatggcgcatccaactggaaagaccgccaccgtctttactgaaagcagagcctaagtgaccaaccattaattcataagggaggacataggcgaatagtaagacaatccatgagaagacaactgccatcccttggttttgaaagttataaataatatcgtcaaatccaatgacggtcacaaaatccattaaagcaaggacttgccaggtaatatatttcttttttggttctatttcatccatcgtaaagaaaccccttttctgaaaattcacaatgtttttattataatcaaatcagaaagggaagacaaaacttttttgactgtttcacattgatttttaaagaacgggggaataatcttacaaaattgttattttagcccgttaaaatgtcatctaaaaagcgcgcatgccgttttaatctcttgtaagatagaattatcataaaatctggaggcattattaatggacacaccaacagtcgttagcgtcaaagacgttaaaaaaacatacggtaaaccaaacgaaaaacaatacacagccttaaaaggcgttacttttgatgtgaaacagggcgaatttgtcgggatcatgggggcttctggttcagggaaaaccaccttattgaacattttatcaacccttgacaaaccgactgctggccaagttgaaattaacgggcaagcaattaatgggttgaaagggaatgaattagctgattttcgtgccaaggaaattgggttcatgttccaagacttcaacttattagaaaacttaacggcctatgaaaatatggcattaccattgacgttacaaaatgttggcggtaaaaaagtccgcgatttagtcacatcaattgccaagacgttatcaatcgatagtttattaaacaaatacccaactgaattatcaggtggtcaaaaacaacgggtcgccgctgcgcgggctttagtccataatccagctattttattcggagacgaaccaacgggtgcgcttgattcaaagagtgccaaggaattattggatacaatggctcaactgaacgaagaacaacgcgtttcaatcttattggtaacgcatgatccattttcagctagttattgtcaacgaatcttgtttattaaagatggtcaaatcggccaagaactcgttcacggcgataagagtcgggaagccttttatcaagaaattttagatacattaggcacatttaaccattaggaggaagtctaaatatgttattgaagttatcattaaccggcattaaaggccgtttgaaagactatttagtgcttttttccggtctaattatggcaagtgccattttttacatgttcgaagcactggcaactaacaaaagtttcgttacgagtaactcgccaattagtatggcgggcattattttccaaatcgggtctgttttattagggattatcacattagtctacattatttatgcgaataatttcttaatgagcatgcggcgccgtgattacgggatgttcatgatgctcggcgcaaaaggccgcaaaattgcccaactaattgctgctgaaacattagtgattgggacagctgctactctcagtggaacggcgctcggggtcggattaacccaaattgttagcaatctgttattgtctcaaatggatattcagattaagcatttttcaccattttacttacctgcagtgttagtaactttgattttcttcattatcttgttcattattgcagcggtagttaatcaattccaacttttgaaaacaccagttttacaactcttacacgatgatcaacaaccaaatcgcatttcacaaaataaattaagccgtattgtacaaattgtcttgggcttacttttcttagctgttggttactatatgatgattaaagtcgcaacgttccaaattatgggcttagttgtggcattagtgacaattgtgctcgggacgtacttcttgtttaatgcccttttcggctggttgattacgttgctcaaacgtaacagcaagattcgtaatcgtggtttaaataattttacgttagcgcaattgagcttccgcattaaggattacaccaagatgctcgcattggtggcgatgttatttgcatcggcactaggcgcaattacagttgggattggctatcaaagtgaaattccagaaatggcagaaacaatggcgccttacgacgttgttttaaatcaaccgaaccaagaagcattgcgcctcacaaaagatttaaagggtgtgaaggcgactgctaattacgatgttaaagaagatgcgaaaactgtctactatcggacagcacaacttgaaaagtcaccaatcatggccattcagtttggtaatgggaatggtgtcgcccgcgcaaaaggggttaaaccggtgaaactcagtgagattcaaaacggcgattcttcatccttgcgcgcaattcaagtgccaagtcaatctagtaaggacgttaaagtcgtctctgacgctgaatttaatcaagtggcaggcgcaaccacgcaagttaaaacatatcgggtcaaagactttgcggttaatttacccgttatcaaaaaaattcacgcacaacaagtgattgcaaatcctgaattggctaaaggtcaaggggctacaatggataatagcaagtatgctaactataagctagcgaacagcatgttcagtgggctcgaatttatgggcttcttcctcgggattgcattcttagcgatgttagcaagttgcttgatgttcaagattttatctggggcagctagtgatgttaaacgctacacaatgttggctaaaatcgggacgcgtcgcaatctattgcaacaatccattgccaaagaaattggggtcttattcctcttaccaggcatcgtcggcgtcatccatgtcctctttggtcttcaattgttcaaattgattatgattgatccatataatgatctctggattccattttcaattttcattattctctacgcaatctactacttactcactacatggctctacaaaggaattgtgttgaaggaagttaaatagtagatggttgaaacagtttaaaacataggaatcagtctaaaaaagccccctttaatctgaacttcgagattaaagggggctttttttagatgaggtcgaagttgtttctctagacgctacttgttacactgatgttattaagaggcgtataccacgctggattagtttttaacttgcttagctacaattggggtgagcattttacctacaaaaaaagccaaagaagactgccgaaactgtcatttgaagcgcgcgttattattgaacgacatgaattattgcccgcgaaaaaagctgaacaatcagaataatattgcccagctctatattcaatgaatattcatacatcaattatcgttttgatactattgaagggttaattgattgtaactttcaacagtaacgccttcgtctgttaaaataactttagtaatactaccgttcattggactaacggtaacatcgaattggtcgttaccaaacttgccaacaatactgcgaatggttgtgccatgactgaccatcaagactttatcaccgtcagaacattcagcacgaagttgtttgaaacctttaccgacgcgggcccaatattcagcggcatcttcagcatcgtggaagggatcagcttctctcatgaaatctttagaggcatcgagtgagtatttggtgatgatttcttggaaggttttggcatcatgactggcacctgccatgtaccacgctttgggtgaatcttcaccttcaaaatagccgtagaattcttcgcggaagtgcggtgtgatagcatatggagtatcaaggtagaaattcttatggagaataattttagcggtgtccattgcgcgactgcggtcactagaataagcttgagcaaaattaactttcgctaattctttgccagcgcgttcggcatctgcaatccctttcggagtaagtggtgagtctgaccaaccttgcatccggttataacggttaaagaatgtttgaccgtgacgcactaaataaagtgtgattcgtttcatatcgtaaccctccaacaatagcttttagtaccttcattctagcatagataaaaatggtgtgcagggtcattccatattttttgcaaaacggttatatacatttataatttttaatggtaataataacaattgatttataatcaattgcaattatcattaagagagaataaattttaaaagatactaataaataactttatcaatatttattaatattttaagcataaatcttttaattttatacattttgtgttatttttgactagtaacacttaataaccacatttagtgtttatgtaaaggagtggttcgatgcaaccagaaacggatagtaaccttgttgatcgattcaacgaatggtatctgcaaattggccaaatttacaataagataaatcatttaactgtcacgcacgacttgacatacgatcaatttttgattctcagagaggtcaaattaaaccccaatattgaagtggcgaaattatcggaatcctttgatctttcaggcccagcaatttcacgtaaaattaatgttttattcagaaaacacttaattgttaaaaatcgcagtgatgaaatggaccaacgtaaagtattcatttcattgaatgagcaaggattacgaatggttgatcaattggaagtcgatttctacttattctttaaacattttaaagatgacggcaatgcagacctttctcaattattcgcacaaacaaaccacttattcgatacaatggataaatgggaacctaattcagatattattgattaggtcaaaaaaagccgcgcacaaatttaaatttgtgcgcggctttttttatttaatcgttaaagttgccattttctacgtctttgatgaaagtcttcaagtgatcgaagtaaacgggtgcgttatcaatcatgtgatggtgaccaccatttggcgttgtcactaagcgagcatggggaatcttttcagccatgatcttagcggttgcgattggcatggtttcgtgttcaccaaatgtgattaacgttgggacagtaatcttgtggagttggtcacggaaatgccaatcctttaatttcccagtcacaacgaattcattatcaccttggaagacgccataaacgtcggttgccattgttgggattaaatgtgagattgcaagtggttgtttgcgatcaacgtaaccagcgtttaacttgtcaacaagtgcttggtattcatcgttgtcgtaatcattcttagcttcacagtcttgcatgaatttcaattgttcaggggtcatgatgtcttcacgaattttgttgatgtttgtgacatattcgtcaatttcatcgaccatactcgagatgatggcaccttttaagtgttggccatatttagcagcgtacatttggaccaatgcgccaccccatgattggccgattaagtagaagttgtcgatgcccagtttttgacggacttcttcaacttcatctaagaagtaatcatatgttaataattggtcattgcctggttgtgagtaatcaggttgatcagaataaaatgaaccaagttggtcgtacatgtgtacttgtacaccaagatcagctaattccttaccgaagttttcccagtattcgtgattaccaccagggccaccgtgtaagcagagtaaatgaatgtcgcctgttccttgcgtattagtccataaatggtaaccattatccaatgtgaggattgttgttccttgtttcatatctgcaccatcctttaattatgatagtttcattataaacctattagagagaatgtgcgagggtcaacatgatttagttgagcgtttctaattggcgtcgaatggcaggaacagcctgtttattccccgttagaatgaggtgatcattgagatggatttgcgtgtcaccatgcggcatgatcagttgcttatcgcggtaaattcgactaattgtgacttggtccacaaatgggagattagaaagttgaatcccggtgaagcgccgatttttaaccgtgacttcgaagagcccggcatcagtgttatcaatgatttgtaaggtagatggagtctcgattaaacttcgcaacagactgatatttgcttcgtaagtgttaaaaatttcaacgccatgttctttaagttcatcgtattgatcgtccgagatattcttaaattcaaagcgggcgatgatccgcggtactttggcctgaatcgcttgttgggcaagttgataattttgctcattatttaaatagcctaagaccaggatatctgtatcgaagacggccgcgtcagttaaggtggctggtgccaagtcaggcaagagttcgaggttggcttggctatggtagatttgataattttgttcgttattggtaaataattcgcttgtgtacagacctttggataactgttgggcgattggaattgtcatgatgttggcgccgatgaagttaacacgtttgcgtggcatctcttcaggcgttggtaagtagaatcgattgaacagaatcggaccaagaatacagctaatcaccgctgcaattgtgaaagcgccggattgctgtgtcgtgataaccttcaagttgagaccgaccgtcaaaatgggtaagaccaacgtgatggtcgtcgaactgaggaaagtcccggcgagggcgttggtgactttgaagcgccgttttaagacgaagtaaatcaaaactttggcgcccatgaaactgatgaagaaaaagggaatcagggtcagtgatttaggatcacgtaagagcgcggggatgttgagttttgcaccggtcataatgaagaagatgggaatgaaaaagccgtagccgattgatgttaatttatcttgcgtctcttcacgggggcgtaaaagtttcatgaccatgccggctaagaaagcgcccaaaatactttcggcaccgacttcttcggcaatcgatacaagtgtgatgattaagaaaaaggctaaacgaatatcgagttgagtcgttgacttatcaatccgctcaaagaagtgataaacagttttaaaacgcatcaataagaagatcgcggctaagaaaattagtgatagtaaccacagactcttagaaccaggattattgagggcggcataaattgttaacgaaatcagcgggacgatttccccgaggacggcaattaacagaattgtttggccaagcggctggctgaggagttctttttctttcaacgcggcgatgacgacccctaacgcgatggttgaaaagagaattgttgcgagtccaatatcggtgaacaacccactccatgccaataaactggcgagtcctagcgaacttaataggatcagcgtaaaactaccgactgccagttgtaagggcgtcagcggtgttttaacgccagatttagctgtggtgggttgctttttaaagagttcaaagtcgatttccatcccgcttaagaaaattaagacggtcacacccaatgatgaaagttccgtcagtgtgggggtggttgagatgaggtggaagccactttgtccgagtaaaatcccgaccaaaatttccgcaacggcggttggtaaataagaaatcttaaattttgccatgagtaacggcgtcattaaagccgccaatagaacgattacgagcgctaagcttgtcataaaaaagatcctttcaatgcacaataaagttgtgtagagcatacactaacctactaaagcatgtcaaagccgaatagcttccgagcaacagtacgggttcgtaaataggcggtgtagccgactgtttgcgggccacagctgtgcacaggaagttggctttgatagctagatgggtactaaagcatgtcaaagccaaatagcttccgagcaacagcacgggttcgtaaaattggctttttatatattggcgctaatattatcgattttgttgataattcgttagtgattaaattattattaaaaagttggcattatcgctagttaatatctacaactaatttacaattggtaataacttctgtaaaatagatgctacgatattaaaaagggggcgatctaaaatgaagataaaagaaagtctcgcggttggaatttttgccttttttggcgggattttacgctatgcaattgggctcggattgcaccaagcagcagggtttccgtatggcactttgtgtgtgaatttaatcggggcgttttgtcttccttttttaatgcgttacatcgtggttcgttatcagatcagcgatacgctggcacttgcaatgggcacgggctttttcggcgccttcacgactttttctagttttagcgtggatgcattgaagttattggtggccaatcaatggtggccatttagcctgtatatcgggattagtttgattggcggtgtctgcttaagtttagtggcagattactgggcagtttggctgctcgatcggcaaggaaagtcgcaggtgctaaaatgatgacgttattaattgtcggattgggcgcggcaatcggcgctattttgcggtatcaattaacccgtcttggaacgcagattgccagcgaatatccattaatcacctttttaattaatttaacggggagcttttgcttaggctgggtgaccggggcacaattggatcaaacgtggacgctctttttgggcgtcggggtcttgggtggctacacgactttctcaacgttcaatagcgaattgagtcagctgtggttccgccgccgttaccatattttctttggttatctgctattaacctacgggttagggctagtggttgcagcggccggcttttttgtgggaagatcgtgaaacgtgctttagcaaataactttttccgcttagctacatcaggaaaacaatcgactacatcgcttatttccctgattaggctaatcctcgaaagttaaaccgtttcaaacgcactctaaacgtgctccgataggcatatttctacgcttaaccaaatttaccgaaccgacgattgcatcgccaattcggtaaatccagttaatgctcaaaatataagcgcctatcgtcgcactcttgtgaatttagtgttaaacttgtagaactgtttatttagaaatcgggggacatctgctttgactgacgaacaaaaatcattagaacaacgccgtttaaccgagattgtcggtttaattaaaaacgccgaaaagcacttcgaaggcgccgttgaacgggctaaatcagaagaaaaagaaattaacgcaaacttctttaatgatgtacggttgaatttcaataatgattcagcaatgactgaaacggcagtctcaatcgaacaacaacggcaaatgttgcaagaacggaataattcttggcaacaatcttcccggcaacttgagactttacaaaaaatggaaaaaaccccttatttcgcgcggattgattttaaagaaaagggtgaaccaaagtctgagtccatttatattgggctagggtcattcaccgatcgcgaagatcatttcttgatttatgactggcgggcacctatttcatcaatttactatgaagggaagactggtgaagttacgtaccaaacgcctgacggcccgcaagacgtcaatatttctttgaaacgtcaattcttaattgaagatggccaaattaaggcgttatttgatacgcaagaaacaattggtgaccaaatgttactggaagtattgggcgaaaagtctgatacacaaatgaagagtatcgtgacgaccattcaacgggaacaaaatcaaatcatccggaacactgacgcggacttattgttcgtgcaaggggccgctggttctgggaaaacatccgcgattttacaacggattgccttcctactttaccggtatcggggtaacctggattccagtcaagtgatcatgttctcgccgaaccaattgttcaacgattatatcgctgacgtgttgcctgaacttggcgaacaaaacatgattcaaatgacttactatcaatatgttgcacggcgtttgccgaaccttgctgttcagagtttatttgaccaatttgaaaccccaatcacggaaactgatgcgcggattagccgtttgaaagaaagcctagtcttctataaagcagttaaacgttacgcagcgcatcttgaaaagggcgatatgcgcttccgtgatttgaaagtgaacgggaaggtcttgattagtaaggaaaaaatcagcgacgtctattaccgtttcaacgaaaactatcatttaggaaaccggctagatgcgacgaaggaaagtttattgcgcagtttgagccataaagtcgaccacgaaaccaaggcggactgggtgacagaacgcgctgaaaacttgagtgatgaggaactccgcgaaattatggcgggtaaggactttaagactggtgaagcggaaagtaaatatatcgctaaacaaatcgttttgaaggctttcaaacccgttcaaaaaggaattcaacgcaatcgcttcttgagtattcaagcacaatacgtccacttcatgcgggttgtgccgcaattggttgatttggctgaatttgacctgacaccagaaatctggaatgatcatgtgactgattttgtcgctaatttaaaggccaaacaaatgacgttatcagatgtgacaccttacttgcatctttatgatttaatgaccggtaagcacggcgaacgcgacatgcgctttgtctttatcgatgaaatccaagattacacaccatacgaactggccttcttgaagatgcacttccctaaggcgcgcttcacgttactcggtgatttgaaccaagcgattttcaccaaagaaaacagcacgaacctattacaacaagtgcaacaactctttgatgcgcaaaatacgaaggtcgttcaattgacgcgttcataccggtcaactgaacaagtcaccgactttaccaagggcctcttaaagggcggtcaaaaaattgaagccttcaaccgtgaaggcgacaagccaaacttgatcgtgcgtcaaagcgaagatcaattggtcgctgatgtgaatgcgcaactcgctaaaaatgaagcagataagttaacgacggcgattatcaccaagacattggtgcaagcccaagaattaaccgctaagttgaaagccagtggtacaaaagtaactttaattcgttccgaaaatcaacgtttggcagcgggcacgttagtcgttccaagtttcttagccaaagggttggaattcgatgcgattatcggctggcaagtcagcgcaaccaactacaatcatgaagatcaacggcaattgctctacacgatctgttcaagagcgatgcatcgcctcactttattagcaacaggtggcatgtcaccattgattgataatgtggatgcggatgattacacgttaattaaatagaaaaaacgcgcgctgaaaggcgggcgttttttgattggatgaaaagtgtaatcgcgagaaaatagacaatgaatattttaataaagcgcttttaattattaaaatgtttatttataaatttaatggattttaaagcgggctaataattatttagcccgcttttttgcatcttatcgctttcttagcttatggattacttattaattgccaaacaaaatattgtacattgaccgattctattcgttaaagtttatatataaataatgtccattattacattatttatattatacttacttataattcgatcgtcccccttagactgatgctggaatggcaattatcgatactaaagtatttttatgaggagtatatgatgcaaagattaaagtatttttacaggcgacatgccttaacagtaaccctattattttttggactattaagtattgcgatggttgcaatcgtctatttacagcccaataaaatcctgtctggttctgactatcatttccacatgaaccgcattgagaatttggcactttcgattaaacagggagagtggtttccgagaatcagttactttttcatcggcggaatgggctatgcggcaggtcttttttacccagatgcttttctctacttaccagctattctgagagtagtaggactatcaatcaaagagagttttattgtatttgcaattgcgattaattttagtacgtttttaatcacatatatttcaggaaaattagcggattttaataagaagcaagcattaatattctctttgatgtacggtcttagtatttatcgttttgcagatttagttaatcggcaagccattggtgaggtgatcgcgctcacctttttcccattaatgattgtgatgctaacgcggttaaaaaaaggtgagcaccggtattggtatctgttatcaatagggatggcagctattggttatagtcatatgatttctgttgaaatgatgggcattgtcatcattatttataccttattaaatctcaagagattctaccaaaataaaagtttaaagtatctcattgctgctggcttattagcaatcggtttattagggcgttatttcttagcggttggagaacaaatggcaaccacgatttttcaagtaaccgcacaacccctggcatttttgtctgaccgcacattaccctttaaagacattgttgttaattcattaacgaatgctgtttttcatgcgaatacagtgaatgtcggtatcacgattctactcggattaggcatcgcgtgtggtctattttactattccaaaaacgaccgtgatttaattgggattgcgttgggactattcatagctacgacgtcgattatgccgtggcatttgttggatcatacaattatcaatacgattcagttcccgtggcgtttttttgccattattacggcaattgtgagttacttagttgctaaggatgaatgccatttattaaagaataagtactacttttatctgctaattctgttgttgggcgcaggaaatgtcatctactctacgaatagtattcaaaaccaaagttggcgctttagaaccaatgctgcctataacacgcccaacccttattacattggggccggacatgagtatttacctgctcaaaccgactaccagaaaattttgcgacataaaaaacaggtcgttaagtatcagccgcataaaataaaaattacaaatgtacggcatacatggggccgttatcagtttgatttcagggcactgacggatcaaaaagcagttgttgaagtcccctttatttattacaaagggtacgttgccgaactcaaccatcatcagcgattaccaatgcagatgaataaacgaactgggttaacacaagttgcgttgaagggaactggtagaatcaccgtttattatcgaacaactacgattcagagaatagggacggtggttagtttgcttagctttgggatgctgattataatcatttataaagaaaaaaggcgagctactaaatagcgcttattcacggtactagactaatcctcgaaatataatcgcaagatgacgcactctgtttttaatgttaaaatggatgcgtttagtattggaggattgtcggatgaagaacgagatgaaatattatgaaatctcgcgtgatgagtggcgggtttttcatggccgcggtgacgcgtatactggcatcacggacacggagctggaacagattcggggattgaatgatcggatttcacttgcggatgtgagtgatatttatttgccattacggcatctgatacagatgcactatgaacagtaccagatgcgccaggccgaaaaatctgaatttctagagattaagccacataggacaccatttgtcattggcatcgctgggagcgtcgcggtcggcaagagtacgacggcgcgcttgttgcaactccttctcagccgggcctacccggataagaaggttcaaatgattacgactgatgggttcttatatccgacagccacgctgaaacaaaaaggaattcttgataaaaaaggctttcccgaaagttatgatatgccgcatctaattcaatttatgaatgcggtcaaaaataatgttggaccagtcaaagcaccgaaatattcacatcagatttacgacattgtgcccgacgagttcgacgtgattgacgatccagatattttaattgttgaaggaattaacgtactacagttgccatcaactgagcagatttacgtcagtgacttcttcgacttttcaatttatgtcgatgcgcaagccgacttaatcaagaagtggttccttgaacgtttcgatctattactcgatttagccaaagatgatccgaccaactactattatccatacgccatcagtgaccgacagagtgcattccagatggcgcggcgggtatggcgtgacattaatttacaaaatttaaacgaatatatcttaccaacgcgtaatcgtgccgatgtcattttgcataaaacgaaacatcacgtgattgataaggtattcctacgtaaatattaataatagaatgagttttttcacaggaaggccgtcaatccattgacgttttcattattaatcagtaaaatagatacattatagtttgacttagtgttatgaatctagcaatttggtgttacttgttcacaccaaattgctttttaaaaagaggagtgagttgtttggtccaaaaggacatgcaagatttcgataagattatcgtattagattacggtagtcagtataatcaattgattacacgtcgtatccgtgaattcgggattttctctgaattgttgcctaacacgacaacagcagcagaaatcaagaagatcgcccctaagggaattattttctctggcggcccaatgagtgtttacgatgatggtgccttttcagttgaccccgaaatttttgaactagggattccaattctcgggatttgttacgggatgcagttgatcagttttaaaaacggcgggaatgttgaagcatcaacagaacgtgaatatggtaaggctgaaattacagtcactgacaaagacagtgacttattcaaaggtcttcctgaaaaacaaacggtgtggatgagtcatggcgacaaagtcacagcgattccagaaggtttcgtaacggttgctgaaagtgataatacacctttcaccgccatcgaaaaccgtgaacgtcggatttatgggattcaattccataccgaagtgcggaatactgaattcgggaacgatattttgaagaactttgcatttggcgtctgtggggcccaagacaactggacaatgaacgatttcatcgacatgcaaatcgaaaagattcgcgaacaagtcggtgacaagaaagtccttcttggtctttcaggtggcgttgattcatctgttgttggggtgttattacaccgcgcaattggcgaccaattggtcagcatctttgttgatcacggcttactcagaaaaggcgaagttgaacaagtgatggaaagtcttggcggtaaatttgggttgaacatcatccaagtggacgctaaagaccgtttcatgagtaaactcgctggcgtttctgatccagaaaagaaacggaagattattggtaacgaatttatccaagtgttcgacgaagaagcaactaagttaaacggaattgatttcttagcgcaagggactttatacactgacattatcgaaagtggtacaagtactgcgacaaccatcaaatcacatcataacgttggtggtttaccagaagacatgcaatttagcttaattgaacctttaaatacattatttaaagatgaagtccgtgaccttggtgaaaaactaggcatgccatatgaactcgtatggcgccaaccattcccaggccctggccttgggattcgggtcctcggtgaagtcactgaagacaaattaaagattgtccgtgatagtgatttaattctccgtgaagaatttgcactcgctggcttggataaaactgtatggcaatactttacagttttaccaggcatccgtagtgtgggtgtcatgggtgatggccggacatatgattacacagttgggattcgtgccgttaactcaatcgacggcatgacagctgacttctcacggattccatgggatatcttgcaaaaggtttctgtgcgaatcgttaacgaagtcgatcacgtcaaccgcatcgtgtacgatattacgagcaagccaccttcaacagtggagtgggaataaaatcctaatcaaaacaccgcaagtcgtttcgacgacttacggtgttttttttgtgcaatcaatttaggcttttaacggtacttctttgaaatcagacgcaatataaggtaccgtctaatcaatgaaagtagggatgattgatgacaaatgggcaacaattagcgactagtgaaaaaattaaacaagggattgtctttgcggtggcgaagttaattcaaattctccctttaattggcttaaccatgattcatagcgggcagtcagtggcgtcttatatgccgtatatcttattctataccgcgttgaaaactggcttattattcgtgagtagtctaggccacgtgcagaattcatttaaaataactagtatcagtatgctgctagctgctggtgccttattgttattggccatttcgccgtggttgtatctaaccgatatggcggcttttatcttgggggccagcgccagtgtaatcatgccgacctatgagggcgtttattatcacgagcgagtggtttggaaatggcaccttatgggcactgaaattaaaacgttattggcttttagcctaataacggttggtctgttgaccatcgctagtcatttttcatatcggttagtctttattgttatcatgctatttgtattgattggtttcattggcatgcaacgcttcgaaccgtttgtgaagcaacttgatgaatcggtgttcgtcgaacaaaccaaatcgcttaataacttggaactatttgtctgggcaaccgcgatggcgtttgcgctaagatatctgcgcctttttgaagctaaatttgtctggttattaatcacagtcgctgtcattgggttagtcgcgctaatcttgcgggtgatcatcacgcgcggcactaaaacgaagatgccgggttggcttttggttgcggctttaattaacggggcgtttgaaacgttcttaatgctctatatttttgtcgcaattcaaaatcagagtttgatgataggcacctacgtgacttacggtgcggggatgattttagcccaagttattcgaaagagcgtgcaagggcgcttttcgaagttatcagacttaaaagtccaattactaggatttgttgttggtgcgtggttgatgattacgccacatctaattttattaggcatcttattgattagtttctttggcagtgccaacagcattcttttaaatcaccgcgcttattacaccggcgtcacgacgccggcccaaaccttaattattaaatatcggaatacgtatctcggtagtatcctaatgcaatttatcttgatcaccggcttgatgggcctagccgtaatgcggcaacaagacataacggccgtgattgcccaaatcagtggcagcgtcgcaatgtctgacacaaccagtcagttgattcacttggccggcctgattagcgttggcttgctaacggtaattgccggattggctggcagatacttgccggcggtggatgaaaatccgctgatttaaaagtaaaaaaataacggtccctaaatggggccgttatttttgtggtttttgaggattatgttattacttatatggatcttttttggggatgaaaagtgtaaaatgagtagagaggtgccttctagtggttcaatagttaattaaacgaatatgaatgatctaaaagtatgtccggattctaaaggactgcttaaaaatcaacattcttggttatgaggattgagagatatgttaaagagtaagtaactataaaattcattgtaattatgaactatttaaaagatactacacaatgtagttttggtaaaataaaaaatatagattaggaaattgtaggctttaacatagagtgaggtcattttttaagtgaaaaacatttcatacggtagattgtaaaattaatccgaacgctgttcggacataggctatactcagaagttaaccgccacaaacgcactttattttaatactaatttagtgacactttcgacgtgtagcgtttgtgggaacatgtcgactggttgtgtgctttctgcttggtagccttgggctgccaatagttctaaatcacgcgccaacgttgctggattacagctgacatagaccatcttggctggttttaattgaccaacggcttcgatgaagctagcttccaaccctttacgtggtgggtcaacaatcaaagcatcgacttttaagtcatctgcttgccattgcgccatcacttcttcggctttaccgagtgtaaattcaacgttttcgatgccgttaatcttggcattgtgccgcgcatccataacagctgattcaacaacttcaacaccgtaaacttgcttagcatgtttagcgactgctaatgaaatcgtcccaatccctgaataagcatcaatgactgtttcgttccccgttaattcagcagcttcgattgccttgttatacaagacttccgtttgcactgggttcacttggtagaatgattgcgctgaaatttcgaacttcaagcccattaattcatcacgaataaagtcgcggccagcgattaattttgtttcgtcaccaaagatgacgttcgtttgagcagcattgacgttttgcatgatgctgaccacttctggtaaagcttttttgatttcaacggcgatttcacgggcagccggtaatttcttactccgcgtgatgaagacaatcatcatttcgtggctgtaataaccgcggcgaaccataatggtcttcaaaacacccttatgcgtatcttcgttgtatggatcaatgtagaaacgacgcaagatatcacgaatgaccttgatagcttcatcaatcttaggatcttgaatgtagaagtcttccattggcatcacttgatgactgtgtttccggtagaaaccagttgttaaagcaccatcgataaaccgaacaggaacttgcgccttgttccggtaacccgttggatcatccatccctaaaacaggttgcactggaatatctaaatgggctttttggaagacgttcaagacttggttacgcttgaaatctaattgggctgggtatgccaagtgttgtaatggcgcaatcccagtttgtgagtaaatgttagcttttgattcaacgcggtctgggcttttcttcaataaattaactaagcgcgcaaaaccatattgtttattgacctttgtgacttggatttctgcttgttcatcgggcaaaacgccttcgataaacaacggatagttgtcgactttagcgacccccatgccttcataggttaaatccataatatcaaccgtcaatgtttcattttttcttacaggtgcttgtattttcatagttacctctttttaattgtgtaaaaagagtctgagacaaaactgagttttgcttcggactcttttcttagctacaagtgtgcggtcaatccgcccacgttatccaatgttccagtttaacctattttaccatcgccgtctatgtcttcttcagaaattgcttcgacttcctttacgaataaatcttcggcagactgctgagtaggggtttctgatgtaatagcgtgatctggaatatcttccttattcacatacatctcgatatgttgttgcaagttagtaaaggtcattggtgcatcgccaccgtattcgccatctaaattaatcatcatcttaacgtcatcatcactaggccgcgcaactagttttgacgtcttggtataaatgacccgtggatcattaacgtgtttgccacctttaatgacgagtgcgattaaatggactaattcggccatgttggctgtcttaaccacaatcaatgagaaattaccatcattcagttgtgcatccggcgcaatctgttcaaatccaccaactgaattggttaaaccgagtaagaatagggaagcttccccatcatacgtaccttcatcatattccagatgcatcttaatcggtttaatttggggtaacatctcagcaccttttacgacatacgcgagatagccaaaaattgacttaaagtctgaggggacttcataggtcaattcggttagcaaaccaccaccagcaatgttcatgaagtaattgtcattggcttgaccgatatccatcttaagcgtttggttcttcaaaatcacgcgggctgcttcaaccggattatcacgcggaatcttcaaagcccgagcataatcgtttgttgtcccagccggaatgacggccatcattgggcgtttttccaagccggcaatgccgttgacgacttcattaattgtcccatcaccgccagcggcaacgattaaatcgaagtccgcctttgctgctcttgtggcctctttttgcgctgaagcttcttcaggcgttgtttgaaaagcactcgcttcataacccgcttgttctaaaatatccagaatatcagcgacactacgtttcatcacttcatgtcctgaagttggattataaattaaccgtgcacgtttttgcattcgaatctcctaaaatatcaattatcgtttgttcaattcggccatcaacaagtcattgacaactttcggattagcttgaccccgtgtttccttcataatcttaccgactaagaacccaactgcgcggtctttaccgttcttgaaatcgtcaattgattgttggttgtcatctaaaatacctgtgatgattggtgtcaacttagcagggtctgataattggaccatgcctttagcttcaacccaggcttttggatccgtgtcattttggataatttcttggaagactttcttagcaatcttcgatgaaataatcccgtctttaatcaaattgatcatttgggctaagtgggcaggtgtgagggctgtctcttgaaggtcaatttgtttgtcgttcaagtaagcattcacttcacccatcaaccagttagaaacttgttttggtgcggcgccatcagcaacagctgcttcaaagaagtcagacatttccttggtgttcgtcaagacacccgcatcgtattcaggcaagcccaattcatccacatagcgtgcacgccgtttagccggcatttcaggcatattgtcttgaacttcttgtaaccaatcatcaccaatgtgtaatggtggtagatctggttctgggaaataacgatagtcatccgcaccggtcttaacccgcataaggaatgtttcgcccgttttttcgtcaaaacgacgggtttcagggcgcactgtttcgccagcaatcaaaagttgtgattgacgcttgatttcataagctaaccccaaacggacgtgattaaaggagttcaagttcttcaattctgatttcacaccatattgcttcgcaccgattggtcgcacagaaatgttagtatctacccgcattgaaccttcttccatcttaacgtcagatgcgccagtaaattgaacaatttggcgtaacgtttcaaggtaagcataggcttcttcaggcgttgacatatcaggttttgaaacaatttcaatcaaggcagtcccttgacggtttaaatcgacatatgaatagccgtcagagccatgggtattcttcccggcatcttcttcaacgtgcaattcggcaatcccgatttgctttgtatggccatcgacttcgacttcgatatagccatctttaccaaggggttgttcgtattgtgtgatttggtaagcttttggattatctggatagaagtaattcttccggtcgaaatgcgtatcgcgcgcaatatcagcgtgcaaggcagtcgcaaccatcatcccaagtgtgtatgcccctttattcaaggttggcaatgtcccaggataaccccagtcaatcacattcgtgttagtattcggttctgcaccatagtttacaggagatggactgtacatttttgaattggtttttaattcaatatgcacttcaagtccgattgttgtttcgaaattcattaggcttttcctcctttgaagcttggaacgttcttgttaaattgagttgcttgttcaaaggcataacctgcgcgataaacagattcttcatcaaatgctttcccaataatttgtaaaccaactggcatgccatctactaagccggcaggcactgacattgctggtaagccagccatgttagcaggaattgttaagatatcgttcatatacattgtcactggatctgatactttgcgacccaagtcaaaagcggtggttggtgttgttggtccaaccactaagtcgtagtctgcgaaaactttttcaaagtcgcgcacgattaatgtccgcacttgaccagccttcttgaagtaagcatcgtaaaagcctgatgaaagggcaaacgtccctaacataatccgccgtttcacttcatcaccgaaaccttcagaacgtgatttaacatacacatcttcaagtgtcttggcttcaggtgaacgataaccataacgaatcccgtcaaaacgtgacaagttagatgaagcttcacttgaagccataatgtagtaagtttggacggcatacttagaatttggcaagctgacttcgtcaacggttgcccctaatgatttcaaagtttcaatggctgtttcgatttgggctttaacgcctggttcgacaccttctgccatgtattctttggcaacagcaatcttcatacctttgatgtcaccatttaaagcggcacggaaatcaggcactgggatatcagcactcgtactatctttttcatcatgaccactgatggcttgtaaaacagtcgcattatcagcaactgtccgactaaagaccccaacttgatcaagacttgaagcaaaagcgatcgcaccccagcgtgacacacgaccgtatgttggtttgatgccgacaatcccattaaatgcagctggttggcgaattgagccacccgtatctgtccctaaagaagcaacgacttcaccggccgcaactgctgctgcagaaccacctgatgaaccaccaggtactttgtctaagttccaagggttctttgtcttcttgaaggctgatgtttctgttgatgaacccattgcgaattcatccatgttgtttttaccgatcacaattgcatctttagcttttaatttttcaacaaccgttgcatcaaaaaccggcgtgaaattttcaagcatcttgctggcagcagtagttgttaagccatctgttaataagttatctttaatcccaattggcatcccagctaataagttatctgcatcaattggttgggcgtccactttggcagccgcagcttgtgcaccagcttcatcgattgctaaaaaagcatcaacttgtggttctctcttgtcaatttcagcaactgtttcagttaccaattggctagcagttaagtcaccagccactaatttggcatggatactttgtaaatcttcatataagtagttcacggctagtcttcctccttatccataatggcagggactttcaataagccgtccgctgaatctggtgcattcttcattaaaatctcgcgatctgtgccagcttgagccacatcttcgcggacaatattttgaaggttattcacgtgggtcgtcactgggacacccgttgtatcaactttatttaattcatcagtcattttcatgatgtctgcaagttgttcagtaaattgttctaactcagcatcgctaaaagctagttttgaaagttctgcgacatgctgaacttgtgttttatcaatcatgagtaaacccctcttctaattctgtcacttttatccattctgattaattttaccatatattaacgtataagaaagtgacatcccttggaatttaccagtttttcctaatctttaccggtttcagcagatattgaaatatatttttactttctttttaaaagcgtaattgaatgttatgcaattcattagaaggcgatatgatttataagagtttatcatagataagaattcgtttaatcttatatactgagtacagataagaagttgtgaataatgtacaagattatcattaacttatagatgagtgttataatatgaaaatcaatatctcggaacaccttgtagcagtagtagttttaagtttaatgggtggcattgtcttacaaagtacgaccgtttcagcagcgaccacttcggttggtgtaactatcactggtgtaacacctggaatggccgctaaagccaaagaagcagccgcagaacaagccgctttagaagaagcatggttacaaacagaaatcgatgacagcgaacctgtagaagttaccgaaacaattggcggtcaaacaactcactactgggaatcagcagatggctcacgaagcacaactgcccccgcagaagttcaagacgaaacagtagccgcaccggaagtagcacctgaacaatttgaagaaacagcagttgaagaagaccaaccagccgaaaacttcaaaccaatgcctaagaaacatgacatcgatcaaaaagcaattgctttcaaacaactcacaacagattgggctagcaatcaaatcatgtcatcattggaagacttaatcactaaggctttccaacttaacaaataacactcagtattagctaagcggcaagtatcgtaaccaagcgtccccagttttgagtagtttcaaaagcaacactcaatagtctgtcggtgtaacttacggatttacccatactagaagttactaaactatttagaattgtttttttcctattttaaacgtttataaccactccactgctaaaataatttcattaaagtttgatgagttcacccaaaattttgggtgaatttttttattgcttaatgatttttcaaaaataagtctaattttaatagacatttcacaacttatttcatgctcataaaagaacccaaacctactgatagaagcaacttaattaattatcgggctgtattatcggtatccagtctgaactcccttcatgtaattttcatttacggcagactctggctagcctgatcacagcagaacacctcaataggtgttatactcttaataacatctttttaaaaggagtctatcatgaaaaaatcagtccgtttaagcaatgccgtccacctgatgaccctgattgctttaaacccgtttgataacctttctagtcagcgcattgctaaaagcatcaatactaacccctcttttattcgccaaatcatgggacaacttaagacagctggcctattgacgagcgttaagggccatgccgaacccaaactaacgaaagctcctgaccaaatttcgctctgtgatatctataaagccgtcgatgatacccggttattgaacatcgatacccaaattgatcctagttgcggccccggacaaaatattcaattatcgcttgctacctattacgatcaaatccaagaaactgctgaacagcaaatgcaagccatcaaactagccgacattatcgaacaatatcagcaacgtctcactgaaaatccagaattaaaactttacgaaaactaacacacaaaaaggttgggcaaattgcccaacctttttgtgtgttaatcctcagcggatacccggctgatgccgcactcttttcttttaaacgtgctctatcagccaaccgcttccggttaaccctgaatggcaaacaatcgctaacccggttattcaccattctgtgttaatcctcagcggatatccggctgatgccgcactcttttagatttgctagtacctttactaagtcatacttaactgcaataccgcggtccgttaattcacgtggcacaatcgcatctttgggattaacggtgatatatgttgcttgtggattttggtacgttagattcataaacggttccttaataaacatcggtgtcatcatacccacacctagttctaaatagaccgtttttttaccttcagctttttgaataaattgacgatactttgcgtattgattgttgtagtgctgaccttcaagaaattcataaccacggacccattccaacatttcagcaccacatttaaggcactgcggaattaagttttcgggtaaatggccattttcaatttgcggaaataattgatcaacaactgtctgattaggatagacttaatcatgacatttatcggcacattgaaaataggaccagtcaccctgaatcgtggcgacatctttatctggaaaagctttcgagaattgcacgtcttgattcgtcgttatcaaatcatagtctctatcctttaaaatggctttcaagtcctgatacggttggtaaactggttcatgtaaaacaaaatgaattaaagacagcttaaagccccataaatcgccgggattataccaatcgggaccagccgcagccgacatgccggctgcggctcccacgatgacgtaatctgcctctttgagcgtcgttgccattttttgtagtgttgcttgatagtctaaattagtcatttttgaggagctccttaaaatgatcatcgattgatccagcaagaccgattgaccgttgttcaatggctgcgggaatattgatttcgtgcggtaaattcaacgtgatgtaacggtaacttagactttgcgccaccaattgcatgaggagcgccttaattaactgattattagcaccaattcctaattccagaatcaccacgttttgtgaacggtacttttgaacaaatgcgttaaacttagcttgttgcttttgaatcatcggcattggattttgattgttaccaaaattaccttccacttcaaaaatccgttcttcgtcaaatccactcagttgaaaatgcatgttgccatttgatgtgacaacaaagtattcatgatcgcccaccaactactttaaatcgcgaaagacaggtgtactttcatagtgatcaaccatataatcgaacaatactttgtaaaatgcatctctttcagccactgttggatagttgtaaaaagccccttgaagaatattcataatcccgtagcgttcataaaaagtcccaaagtgggtcataaacgcttcgtcgtgtgcaaaaatattgtaaccttccgtaattgatagcccgttaccagcactaataatgacggcatccgcattgtctagccaattccgtgctgttttaaactcgttcatgatgctctcctttggtgtaataaataaaataacaacaatatcgcatattgtacactgttatttttaaaattacaaccactgacttttaaaggtccaaaaaaatagcgtcgacaactgcgttagttgtcgacgctatttttttgcctatcagtcataactgactgttgtcgcactctttaattaataactcccgaatacgtgggttgagaaccttttactgccggctgctcggcctacgtaagcttgcatcccctctgcagacgagattgaaatatctaatggaatattttgtggtaaatatttatcagcagcggttgcaatgtattgtgtgaaactcatgatttctgtttcactgtagaattgtgtattaacggtgatgttcatcccagccaatacaccatcttcatagtgtgcttgagccgtgacaccactcaagttcgggaagaaggtttggacttgttctttaaaactagtaaacgcgtccgcatcactttgattgaccgctttttcatcattaacgagtgggaaaacttggttggcttggttcattttgtgccatgaatcaatcgttgtactaccgtttttgctgaccccataagcgaagaaggttccgcccactaaactatccttaggtgcttgtttgtaaagccccaccacgatggttgtcttactcaaaccttttttctgccgtaaacgcgttaagaccttattggccatttgtttaccttgttgcgccatcatggcactagaaattttggtttcaaaagtagcaccatattgttccttggtatagtaatccacttgattcatcccaagaccaatactcatcccttcaagcgcaccatctgcccctaagaagtcttgttctaagatttgttggagatacagtggattccgcttatccggttctttttcaccattatcttctggatttaagccaagtgtattatcttttgattgacgtgccaaccatttttgcgcttccgccgttttgatggtttgaccttcttggtagaggtatttatcagtagggaattgttttttagaaatgtttaataagccactttccaaactcttcacatcaaatgccgtgttactttgttgtgtggttaatccacgtgtctgacttgtcttgtattggttattatcaataaccccttcatacatgctgtcagtcactttcccggtcgtttgtagctttttagtcgacttagttgatgatgacgaactcgaattgctttgtaaacttgtacaacctgccaacaataaaaccgttgcggctgcaactacccataatttatactttgccactgaaaatggcctccttataagtcctaattgattcgcttattgcgccaaataactgtctaggtctgcttcgttgataattggaatctccaatgcttgcgccttggttaatttactgccggcatcttctccagcaatcaaaatatctgtttttttcgaaactgagccggtcactttagcgccattatcttcaagttgttgtttcaactcaccgcgggtatattgcgatagtttaccggtcaagacaaccgtttttccgttaaagtaactatcactattttcagcttgtgcctttgtcaccccagtataggtcaggttgacttgcacttcagccaattcacgaattaaagtttgtacttgatcatcagcaaaataagtcgctaagctatccgcaatcgtctcgccaatcgtatcaaccgacataatttcttcttgatcactggccatcaaagcctccatcgtcaagaaatgttccgctaataaacgggctgctttggcaccaacatggcgaatccctaatccaaataataacctttctagcgaattctggcgactagcttcaattgcatttaacaaattattaatagatttttctttaaacttatccagttgcgcaagttgatcggccgttaagcggtataaatcggcaacatcatggaccaatccttgatccaataattgggcaataatccgtggacctaagccgtcaatattcatcgcatttctggaagcaaaatgcgttaactgttccttcacttgtgccggacacattgggttaatacaccgcaatgcaacttcttcatccaaatgaaccaattcatgaccacacgaaggacattctgtcggaatcacatacggttgactgtcagccggccgtttagccagtactacttgtgaaatttctggaatgatgtcgcccgctttgtgtaataaaaccgtgtccaacaaacggacatctttatcacgtaacatatcagcgttatgcaatgaggcgcgcgcgactgttgtaccagccaactggacaggatccatcacagcggttggcgtgacaacccctgtccgaccaattgtccattcgatgtcacgaacaatggttgccgcttcttcaggcgggaatttataagcaatctcccaccgtggcactttaaccgtattaccgagttggcgttgtaaagctaagtcgttaacttttaacacaaccccatcgatgccgtattctaagtcatcccgcgttgcttgatagcgctcgataaaggtctttacctctgtcatattatgacaaacttcagcggttggattgacgttaaagccgagttctgcaagcacttcaagcgcttcgtgctgggttgtcgcttgcacatcgtcaaaggtgacaatcgtgtacataaaggcactcaaattccgctcagccgctattttggcatctaattgccgtaaactaccagcagccgcattccgcgggtttgcaaatggcggttggccttctgcttcccgtttttcatttaatgccgcaaaagaggctttgggcatgtaacattcaccacggacctcaatagagactggcttggttaatgtttgcggaatcgccttgatggtcttaagattctgggtaatgtcctccccaatcgtcccattgcctcgcgtcgcaccacggacaaattgccctttttcatagatcaagtcaatcgcgagtccatcaatttttaattcgacattatattcgatggcatgctcaacgtttttttgaagtcgattatcaaaagtcgcgagttcttcctcagaaaaaacatcgcccattgataacatcggtacttcatgcgtcactttcttaaagccaggcagaacttgatcaccgactttttgagtgggcgagtcattagtaacaatgattggaaaggccgcttctaacgtttctaagtcgcgatacaattcatcgtacacgtgatcttcaaccactggggcgtcctttgtgtaataggcttcgctgtattcagctaatgtctggcggagttcttgggccgccgctgccgcttcagtttgcgtatattgatcgattggtttagctaatcccataatgaagactcctcactgcttatgatttgaaacgtgctttttaaagctgactcttgtgcttagcttcgtattgcaaacgaccgactttgtcggtcattcacaacactgtgctaatcctcagaagataaccgtcggaaacgcactctattctactttttcaattggtgcgaagcttgctagtagtcttttaacgccttgttctttgaaggcgatatctagttcttggtcgttgccggtcccgttgaccttgacaactgtgccaatgccccacttcttgtgttggactttttggccggctgtccaagcgccgctgttatcgccgccagttgtgtcggcaatcttgtgactcgtcgttgttttatttgcattatacgttgtagccgttgcgcgtgcataacgattgctcttaccaaatggcacattgcgttctggaatactgccagcattgccatttgcgtaatccaataatttatcatcgatttcgccgacaaatcgggacgcttggttactttgttgacggccgtataacatccgtgaataagcgttggttaagtacaatttgctttcagcacgggtaatcccaacatatgccaaacggcgttcttcttccagttcgtcttcttctaataaagcacgtgatagtgggaagatgccttcttccatccccatcaagaaaacaactgggaattcaagtcctttagcagcatgcaaggtcatcatggtcacttcactggcttcttcttcgactgaatctaaatcagagaccaatgataattcggctaagaagtccacaaataaatcactgtcatcttcttctggttcataatgttcgtcgaattgtttggtaactgagagtaattcttcaatattttctaaacgactttgcgcttcgagggtattttcaacttcgagcgcttttttgtagccagtcttatccaataattgttccgttaattccgtcacgtttaaaaattcgcgcatcttcgctaagtcaccaatgacgttgccaaaatcgatcaacgtcttgcgactcttacctggaatggttgagagttccgcattttgcgctgcttcaagtaatgaccattgatgatcatccgcgaattgcgttaatttttcgagagtgccggggccaattccccgtttcggactgttaacaacccgttcaaaactcattgaatcagacgcattcacgactaggcgtaagtaagccaagatatccttgatttctttacgatcgtagaacttatgcccgccgaccatcttgtatggcatgttggctttgacaaacgcttcttcaattgaccgtgattgggcatttgtccggtataaaacggcaaagtcgccgaatttacgttggttcttttgcatttcttcttggatcttcgtaatgacaaagagtgcttcgtcacgttcactttgaccccgataataagtaattggttgtccttcgttattttcagtccacaattccttaggtttacgatattgattattgttaatcacaccgttggctgcttctagaatcgttttggttgaacggtaattttgttccaacatcactgatttagcatctggataatcatgttcgaagttcatgatgttgtccatgttagcgccccgccaaccataaatactctgatcggcatccccaacaacacagagattcttgtatttatcagctaacatgttaaccaatgtgtattgcgcttcattggtatcttggtattcatcaacgtggatgtattggaatttttcttgatagtgttcaagcgttggtttgttttctttaaataagcggatcgtttgcatgattaaatcatcgaaatcgagcgcttgattttgttggagtcgtttttgatattcggtgtagcattgggccacaattttttcgaatggtccgtttgctagacccgcatagtcgcttggtgtttggagttcatttttggcgttactaatcgtgcctaaaatcgcctttggttcaaacttcttcgtgtcgatgtttaaatcccgacaaacatggcgcattaacgtcaattgttcagaaggatccgcgattgtaaacgcgcgattgtagccaatttgttcaatctcccgacgtaaaatccgcacacaaagggcatggaaggtagatacccaaacatcttgagccccttcgccgagtaagttaccgacccgttcacgcatttcacgcgccgctttattcgtaaacgtaatcgccagcacgcgccatggtaaaacgtgcttttcttcaattaaataagcgacccgatgcgttaacacccgggtcttcccactaccagcacccgccatgattaaaagtgggccttctgttgtgaggaccgcttcagcttgcttatcgttcatcccttgtaacaattctttttcagacaaattagtcatccttccgtaaatgcaatcagcctatattataccaaactagataggtagaaaaaagcgaacacgatctagtaaaacggattctaatttttcgcaatcttctgccttgacctgggacgcgtttcataaattatactcaccttaatccaagaaaggtggtatgcatcatgattaaatacattttttctaacttagacggtacattgttaaaccaagacggacagctttctgaaaaagatattgcggctgtcaaagcaagcccaatcccaatttccttgatttctgcgcgttcaccacaagaaatgcaagctacgattgatcagttagcgttaacgacaccccaagtcgcttttaacggggggttaatttatcaaccgacagatcttttcccaatggttttagcagaatatccacttgcaacctctgctgtcgcaacattaattgccgcattacaatctgaatttagtgacatcagtttaagtgcgtatgacttacaccactggtacacgcagacaattgacgctggtattgaggcaatcgctaagcaaaccggtcaattgccgacgctcatcaattttggtgatcaattgcaaaatccatttctcaagcttttcaaaattcaactgattatgcaaacgacacaacaacgggcaactgttgctgatttcatcaaccaatgccacttgcctggtctttcagtacaacaatcaggtacaatgaccttagaaattacgagtcatgaagccactaaagctaacgcattaaccaccatcttagaaaacactggactaacagtcgctgattgcgccgcgtttggtgaaggtcaaaacgacttagccatgttatcgctagttggccaccccatcgtcatgggcaatgccagtgatcaaatccagatggcgggtcaattcattacgaagactaatcatcacagtggcttcagctatggtctaaagaaatacattactaaagttaatcaaaaagtaggttaggattatgccaacaattcgtgatattgcccgcaaaagcggctattcggtttcgaccgtctcccgtgtgttaaatcatcaaaaatacgtctctgaacctgccaaaacggcaatcgaagcggtcattaaacaactcgattacgtgcctaatagcttagcgcgcgatttaagcttcggtcaaaataaaactattggggtcgtcctaccgcacaatgaccatccgtatttcaaccaactcttaaacgggattatggatgctgcgttttcaagcggctatcacgttgtgctcctaccttccgaatataatcaagcagtcgaactagattatctcgaacaattaaaacgtaagaattttaccgcactcatttttacttcacatggtattgcactctcagtcttagcagagtacacgcgttatggtcaaattgtctgttgtgaagacccggggacccatcatatctcggccgtttattctcaccgtgagcccgcctatttagcggcattcaagtaccttaaagcccacaaagcacagcaaattggtctactattaagtcgtaatttagcgcaaagcccgacctggattgccgtcacgaacgcttatcaacaagttttcaactgccaacctgattccgagttaatggtcggtggcatgcgctcatttgaagatggctatcgcgccgctgaacaactggttgaaaaacagccaaccctcgcttgctattttacaaatggcgacgacattgccgctggtgtccgccaatatcatctggatcatcaactgccgaccccgcttttaattggtcaagaaaaacaattatccagttttttattgcaactgccaacaattgaccatcacttcttcaccctagggcaaaaagcgtttgaagtcgccctcagtaaccatcaccaagtttgtcgtttcgaatcagaatttattttgccataaaaaagccaccttaacctaacttttaggctaaggtggctttttatgtcggatgcttatgcaaacacccgatcaaaaattgtttgaacttgttttaagtgccattggtaatcaaaggcgtcgtctaaatcggcttttgaaagttcactcgtcactttcggatcggcttctaataattggcggaaatctttttgttcatcccatgctaaggctgtcttcggttgaaccaaatcataggctgcttcacggctcagacccgcatccactaacttcaacaagacacgttggctgtaaattaaaccatgggtgatgttcatgtcagccttcatcttttcagggaagaccgtcaacgtcttcacaatccgcgtgaagcgattcaagatgtagtccaataaaatcgtagtatcgggtaaaataatccgttcagctgagctatgtgagatatcgcgttcgtgccataatgacacatcttccatcccggtaatcacatgaccgcgaatcacacgggctaagccactaacgttttcagaactaattggattgcgtttatgcggcatcgctgatgagcctttttgacctttagcaaagaattcttccacttcgcggacttctgttcgttgtaaatgccggatttcagtcgcaaaatgttcgattgaggtcgccacgaccgccatcgtgttaatgtaatcagcatgtagatctcgtgggagcacttgcgttgaaatatcttgggcccggatccctaagtgttctgtcacataggcttcaatttcaggcggaatattggcgaaagtcccaactgcaccactgattttaccggcttcaacgccttttgctgcgcgttcaaaacggtcttgattgcgtttcatttcagcataccaggttgctagttttaacccaaacgtcgttggttcagcatgcacgccatgcgtccgcccaatcatcacggtattttggtattcgtaagctttatcttttagaacagccataaaattggcgatatcagcccggattaaatcgttcgcttgtttcaaaatatacccttgtgctgtatcaacaacgtccgttgaagttagaccatagtggacccactttttttcatccgctaaggattctgaaacggcacgggtgaatgcgaccacatcatggtgtgtgatggcttctaagcgattgacttctgccaaatcaaagctagcattcgcgcgaattttctgcgcatcctctgtgggaatatcgcctaattttgcccacgcttcgacagctagaatttcaacttccaaccaagcttgataccgatttttcgttgtccaaatggcgcccatttcgggacgtgtataacgttctaacataaacttctcctccaaatactacctaaatgctggtgatggtaaaacgtgctttttgtggcatctttctgtgcttaaccaaatttgccaaattcgcgattgcatcaccaactcgtcaaatccagttaatgctcaaaagataaccgccacaaatgcactctgttttgaaacgtgctccatcgggcatctttctgcggctagctacgtccgtccaacgatcgactgcgtcgctcattcgccggcctatgctagtcctcaaaagataaccgcccgctgtcgcactctaatataagtctgccgcttcgtaattatcgattaagggttggatggcttgtccggttgctgtgaccgatccaatctgttgattggtcgtgacgttgtgcaaattaaagtaccaatccggtttgatcttcatctgtgtttgaattaatgaccgttgtgcttcttgaatccctaaggtcatccccgcattattgaggcgtgatgggccgactgccaactgacagatggccttcaaatgatattcatattgcgagaaattcaaggtatgtgtcaagacatcgcccgttgcgtgcggtgttggcataattcgtttcacataaatattcatagcgggtgttaaaaagaattcaaccccaaaaacacctgtatagtctaatttttccccaattaagtgggctaatcgattaatttcagtcgcaacatcttgattaatccgtgctggcacaagcgacattttcaagcgatgatcttcaaactcattttcgatgactggcagtgtcacacacttaccatcttcagttttaacgaccatcactgatagttcttgtgcgtcgggaatccaagattccaaaatataagtccccaactcaagggcagcttcaatgttttcaaggtcactcggttgttgaataaaacgttgatactgcttaccgtaacctttttgaatgggttttaagatacatggatatccgattgaatcgattgcatcttgaatatcatctacatcaacaactgtcgcatagggcggaatattgatatttaaatcactcaaaaagactttttcgaggtaccgatcttgcgtcacagacaacacattactgccttgaggtagataataatgttgtgccagttgttcgagcactgtctcatctaataattcattcgtataggtcaacacttgactgacttcaccgagttggactaatgtttgataatcattgaattcaccatcgatctgactatcaattaaacgtgcaaatgaggtattttgcatctgcggggtcacaatcgcggctacccgataccccatttcttttgctttgagcgccaacatataggcccgttgatcatttccaataattccgatggtttgtcctggataaataactggcatcatattacctgctttcctgttcaccaaactgtatacccttattatagcgaatttaagcgttgtctgcctaatactttcctccatgataacaaatttttagacaaaaaaagagtgcctctcagcactccgttaaataacatttatttattttcgtctaaaaagacgacttgaccgtcttcaaacgctgcaattcgtgctaaagattccacttgaatgccgcgttgatctaacaattcgcgacctttttggaaagtcttttcgatgacaatcccgacaccttcaagttgtgcgccggcttcttcaataatagaaagtaagccttcaaccgcttgcccgttggctaagaaatcatcaatcactaaaacgcgatcgtctgcattcagaaacttcttcgaaattgaaatgtggttattcactttcttcgtgtatgaataaaccgttgcgctatacatgttatcttgtaacgttaaactcttgtgctttcttgcaaaaacaatgggaacgtggaatgctaagcccgcgaaaacagcgggcgcaatgccagatgattcaaccgttaggattttagtaatcttcttatccttaaataagcgttggaattcttcacccattgcagccattaaatctggatccacttggtgatttaagaagttatcgaccttcaatacgtcttgacctaatacttgaccatcttttttaatgcgttcctctaatagtcgcacgctgagctctcctttgtagcatcgttaaacatcactaccgatagtagtaacgactaataatgttttctgaaattgaattaaaaatagattaccacaaaaaaagcaacacaacaagctcaaatccagttattcagcgatttgaaaagagcctgtcacaaaccggaatttgtggcaggctcttttgagattaattagtagcagatttcccatgatttgtttcatagcattctttattgatcatattggtcgaggtggtaagccttaacgagctcaattaacttcgctggataatcagggtcagtcgcatagccgtcttgttgtaatgcatgggcagcttgctcataattagtggccgcgattacgtgtgcatactgcgtccggttccaagaggtcccataagcaaacaattgtacatggtcaagcatcgattcttgataattgttatatactctaaaacgcgctgttgtcgttacccactgaccatttaaatattccttggtcgtcatttccttggtgttggcctcattatcacccttaataccgaaataattatggtattgcgcagcaagtgagctcttcccccaatcactttctaaaatggcttgcgctaaagtaatacttggtaaaacatgatatttcgtctgtaattcttgggcatatggcaccatttttttaataaacgcttgcttcttagcttggcgcgattgttgttcctgtctggcttgatcggcaagttcttcttgggccttttgtccattataccgaactaataaaacgagcccaattccgagaataaatagactcactaaaacgaccactagccaatcggttgggtggcgtctcttcttagaatagtagttagctgttggtttgcgttttgtcgtcttgcgtttacgtttttttgccaatcctctgcctcaactttatctgaatctattctatattgtacacaaattcattcagaacaccaatctttaatttgtaacccccctttaatttctatttagcgcttttattgctataatattggctgtaaccgattacgatagtaaaggactgattttattgacaacgcttaactggggaattatcggcttaggcaatatcgccaatagtttcgcaacttattttaaccaacctgatggtcacatttatggggctgcttctcgttcactcgataaggcacaagcctttgccgaccaatacaatattccacatgcatttggtagttatgccgacatgctcgctgatgacaacatcgacatcgtctacattgcaaccccccacaattatcacttcgaaagcattatggcgagtcttgaagccggtaaacacgtcttctgtgaaaaagcgattacgatgaaccgccgcgaactcaatgcagcaaaggctcttgctaacgaaaagcacttgatattagctgaagcaatgaccatttatcacatgccattgtttgctgagattgaacgccaacaagtcgctaatcacttaggcgctttaaaatcaattcaagtctcttttggaagttataaagagcttgatccaaacaatcgcttcttcagtcccgcacttgccggcggtgcaatgcttgatattggtgtttatgccctctcatttgcacgtcggatgttaactgctaaaccagaacttgtagcgacgcaatgggtgccatcagaatccggtgttgatcagcaatcaacattacttttaaataatgccaagcatgaaatggtgactgttaccttaaacattcatgcgaagatgcctaaacaaggtgttctcgtttatgaaaatggctatgtcaccgttgacgattatccacggcctgacaaagccaccctcactttcccagatggtcgcgttgagaccattcaagcgggtgacgcaaccaacgcaatgaactatgaactccatgatttccaagaaacagtgcgcggaaatcaatcaaacgataccctcgaattatcaagcgatgtcatggacatcatgtcagacgcacgtgctgaatggggctttgtctatccatttgaaaaacgcactgatctcgattaatccattcaaaaaacctggccaatttggtcaggtttttttagagtattttagcgagaaccaccatatcttttaggcgaatcccattttcatagattggcgtttgatattggtcgaagaagtttttgcgaatttgttcgaaccgaaagccttaacgcaaataaaaaccaattgctgccaaactgccgtccccagtgccaactagcaatgattgaaacccttggtcaattgcaatcgtctgaatttgagtcatcatttgcccaccgaatcctcgatgctgccattctggccgtaccgcaatatttttaagttctacctgctgattgttgagtgccatcagatggaagaccccgatgacttgctgctgatcgcttacggtgtaaaattgcccatgcatcaaatagcgttcaatcatgccgacttcttcatccgctaacaatagatcatccagccactgtcgccgtgctgcgccctcaatcaattgatacgttaacatctccagctcaccacccaatcaaaaaaaggggtcgcgacaaaattgcttttgccgcgacccctaggttaatttttaaattagtttttgtttacgttaacagcttgtgggccgcggtcgctttcttcgatatcgaaagaaacgctttgaccttcttcaagagtcttgtagccttcaccttggatagctgagaaatgtacgaatacatcactaccatcttcgcgagttacaaagccgtaacctttttctgcgttaaaccattttacagttccgttttccatgagaaaaatcctccttgtgtcgatgacacattataaatttgtgtatttctggtggtccgatggaagaaagttcttttggaaacattcgtaccgcaaccattcaaaaagtacaaacatagtgtaacacaggcaacaaccattggcaaccatttggcaataaaaataaaccgttttctatcacggacaatcagcatccgtgtttttagacaagtgttattttatatgttgaatcatgccctaaataatttggctttttgctttaattacgttaagatagcagtataactttttctcattggagtgcttgcttatgctaaaactattgaaacggctattaccaattatcttcatcggggtgagcctagccgcttgccaaaaaccgatggatactaaacatcaactccaagccgatatgcaaaccgttgaagatgcgactaagcaacaacgaacagctctttcaaccctcgaaacaatcggcgatccagttcctgataactatctcacgattcaaaaaaaatatcccgacgaaaatctattaacgattgaagatactaagattgcgacgactgcggccaagcgcgaagcagcctttcaaagtcttaaagaacaacaagctgtgctcaaaccggtcattaaacgcctcaccaaactggtcaagcaagaaaacgatgaattgccgattgaacaagtcaaagatttaaatcaaagtcttaagatttcgacacttgattatacaaccttggccaccttctacaacgcggccactaaagcatctgatgaattttacagcgaccatacagatgctgatgcagacgaagacagtcttaaatcaccaatcaatcgtttaaatcaatattacagttcagtttatcaacaagccgaaattgctaaggtcaacatgaacacagttgctgcgcatgctaagaaagtgcaaaaacaactggaataaacaaaaaaggagttggacaaagtcacgtttgtccaactccttttttcaatctttaattattcaacccgtggcggaccacaatcgtcggctgtagctacccgcacttgttattgcgtccgtttaaaccgcatgagtggtgttgcgactagtggtgtcaccacagctgctaaggttgcttccattacagcatttaacgcaacaacgccaagcatcacgatgattaaatgggtcggatcagtatgatacatccctgccgcttggtgtccgtaaagcacacgcgttaagccaatcactaaaatggtattgattaaagccccgaaaatcccagctaaagccattgcaccggttttacgaattttagtttgatataagtgttggaacgtaaagccagcaatcatcccagccatcaaccgcggtaaaatagcgataattggattttgaaagattaaaagtgaaagcggatcgcctggagaggtataggctctaaataatgaaatcaaaccccaaattaatcctagaatcgccccttggcgtgtgcccaggatcacggccccaataatgaccgttaaatgaattgttgttacggctggtagcccaggaatgatattaatataaccgaccatcggaataaaactttgaatgattaaaaaagcggttaaaatcgccataatactaatcgtataagctgatgaatttttatgtgtcatcctaactgactcctaaactgaatttattgctcattatagcgatttgtcaccctagtttcaatcatttacatcaagggacaaaaaaaggtaattccaattggaattacctaactgaattatgatgcgggtgagaagactcgaacttccaccgggaaaattcccgacaagatccttaatcttgcgcgtctgccattccgccacacccgcgtaacttgctttatcactttaagccacgtacattagtataagagaaacgatgattgaagtcaattaaaattttactttggagacgattacatgcccattatccccgctaaactaaccgatattgccaaattaaccaccctgtatcaacaattaacgactgaaatgcatgtgctacaacccactaattaccaagctgattacacgcctgagttctttgactggcaacaaatgataactgatccactacaagcagtctttgttcatcaaaaccaagatgcgcaaatcgatgccttttgtcacgttacaacagcccaaacaagtccctcacccttgtttatcgcacaccgctttgcttatctcacaacactgtatgttgcaccagaggcacgccgccaccacgtcgctacacaactgctatcgtccgcaaagcaatggcaacaaacacaagcgctcgattatttagaactaaccgtgttagggaataatccggctgcgttggccctctatcagaagctgggctacaccactcagaatcaaactttacgcgccaactaaaaaaaaggccacccctatgtttaggggtggccttttttcattgaatttgtgtggtttgataaatcagtcgtccatgacaccgccgacaaacatagcgagccgtattcattcgacggcgacgtggatagacttgcccacagtctgaacatttataaatcacaattttgctcgatttagctgtcttttgtgcagctggtgcatagcgcgcacccccgacttgtgcaagtaattgtttaaactctgcgtctcgatgacggtaaccgcgatgcaacagatgcaggtgataatggcaaagctcatgcttaatcaccccttctaaggtctgtgtatcatgttcggtcaacatctttggattgatatcgatatgatgatcctgtaaatgatagcgcccgccggttgtttttaaacgccgattgaaatttgcttgatgcacaaacggccgattaaaaaactgcaacgataaccgttcaatcaattcagttaaggcttgatcagtcatttgcctttggcgctttcattgtcagttgtacgcgttcacgttcttgatcaacactcatcacccaaacctgaacgacgtcgccaactgccacttcatcagaaggatgtttaacaaagtggtttgccagttgagaaatgtgcactaagccatcgtgtttcacaccaatatcgacaaaggccccaaaatcaatcacgttgcggactgtgccttctaacgccatattcggtttcaaatccgccaaggttaagacatcatgacgtaacaatggcgccgtcatctgatcccgtaaatcacgccctggtttttgcaaactacttaagatgtcggtgattgtttcaatcccgacctctaattcagccgctagagccggtacttgcatttgtgcaatcgccgtcttcaacgcatcgcttcctaaagcatcaacggttaacccaaatgatttcaaaatggctttagccgttggataactttctggatgaatatcagtattatcgagtggattgtccccattaataatccgcaagaatccgaccgattgttcataagctttaggccctaagcgtggtactttcttcaaagcactccgcttttgataaaggccgttttcattgcgatattgcacaatgttttgagcagtagttgctgacaaccctgagatatgttgtagcagctgagggctagccgtattcaggttgactcccacactattcacgacatcctcaatcactgtatcgagttgcacagtgagctctttttgcgccacatcgtgttgatattgtccaactcccactgcttgtggatcaatcttgatcaattcagctaacggatcttgcaaacgacgggcaatactaatcgcacttcgttcttcaacgtgtaaatctggaaattctgcccgtgctgcatcactcgcagaataaacagaagcccccgcttcattgacaatcacatagaaaatttcccgggaaatagatttcaaacacgtcgctacgaattcttctgattcacgactcgcagtcccattaccgattgcaatcatttcaacttgatatttctcgagtaaagcagtgaattcatccgccgcttttgatcgtttgtcagctgaagctggtttgtgtgggtaaatgactaacttatccaagaattttccagtgccatcgacaacggctaatttacacccagtccgataagcgggatcaaagcctaatacaactttacccttcaatggtggttgcaacaagagatgcttcaagttatcaccaaagacactaatcgcttgttgatcagctttctcctttaattgcttgcgtaattcacgctcaattgccggtccaataaaccgcttataggcatcttcaaccgcagacttgatgaccattgctgacgctgaatcttgtccatacaacagatcttggctgatccgactggcaattacttgatcgtcaatcataattttagctttcaaaataccttcgttttcaccacgattaatcgctaaatattgatgttccgctaccttcgttaaatcggcagtgaaatcataatagatttgataaacttgcttctcatcggctgcttcgtctttaacttgactggccaactgaccattttgccaagtatattggcgcacccaattccgatattttgctgtttcactaatattttccgccaagatttcatgaacaccagctaaaacagcagctgtatcattgattttttgatctggattgaggtaagcttcagcttttgccaataatgcttgttcggttaagctaggtaaccctgcgataaactgcgcaaaaggttccaagccggcttctttagcgatggttgctttggtccgtcgtttttgtttatagggtaagtacagatcctctaaagcttgcagttgcgttgccgtttcaatttgttgtttgagttttggcgttaatttttcttgttcagcgatatttttcaaaatatcggttttacgtttttcgagcgtcgttaagtattgaaatgtgctttcaatttcacgaatttgaacttcatcgaggcttcccgttcgttcttttcgataccgcgcaacaaacggtacggtattgccttcttctaaaagacctaacgttgctttgatttgttgtggtcgatactgtgttaattgttgaatcacaagattttgaatatcaggcatctgattgcactccttttgcttcaattaaaaaaacagcccccgacttgggaactgtcaactttcgccctaagcgattcttgaaatattttggatgtatttagaaatccgttccgttgctttgtcttgattcatttctgaagctgcaaaagcttgcatatcaacggtttgatcatcatgcatgcttgtaattaaatcttcacagccttgaatgaaatcagcgtaagcaccgattaaacgttggttgttccccatcaaacgagcgggcgcaacaactgttttgaattgtgctaagaattcgtgatattgatcaacaccatctctgaagatttgtgctgtcttttgatagtcttgttcgctcatttcggctaacttaccatcagcaacggctgcttttaaaggggtgaaatacttactcatcccttcttgtactttttcagtattatcgattaaatcgttgacagcttggccgtatttggcaagcttttgttgcgttttattcatgtccatcctcctagtttcctatggtttagtatactaatttcccaatcggcttgcaattaaaatattaaagcatgtgtcattaatagaaaaggcatgcttagttcatcaaaggacatttacctcattaaaaaaacgctagcgacaaaatctcgtttgtcactagcgtcgattattacctatcttctcttcaacattctactcgtccacgactgaccaaacattaactttgtcaataagtcgatacaagcgaaaataactaaataaagtaagaaactcaacaaccaattattttgaacgtgagtaatccgttccagaccaccaaagatgaaaagtgatatcagaaactgtaagaatatttgcatacgtaatcctccctacaaaactcactaacataaaagttatttaatcacctttattatagtttaattgacaagcactttacaaggttggcaacaaattatttagccattctccgctggaagaacttcacaatttccacaatcacaatcaatgagaatgaggctgctaggacaattccccattggtgaatatcgagatgtgacacgtggaataggccgtttaagccaggtaccataatcgttgcggctaacaggaggaatgaagctaagacagcccagttgaaagctttattcttgaaaaagccaactgtaaagattgattggtgtactgacttcacgttaaacgcgtggaagagttgaatcatccctaacgttgcataggccatcgttaacgcatcagcatgtgctaagccgctcgcttgatgcactgggtacgtaatcgctaaggcatacacaccaagcgtaatcccaccttctaagagaccttgatagataatcgcttggaagacaccgccggagaagaagtttgacttgcgcccacgtggtttttgattcataatccccggttcagtgggctcaacccccaacgcaatcgctgggaatgtatccgtcactaagttaatccataagatgtgcaccggttgcagaatttgccagcctaaaatcgtcatcatgaataaggtaaggacttcacctaggttagctgacaataaatattgaattgatttttgaatgttggcaaagactttacgaccttctttaacagccacgacaatcgttgagaagttatcatcggcaagcaccatatcactggcgccttttgatacttctgtcccggtaatccccatcccaatcccgatatctgcggacttcaaggctggcgcatcattgacaccatccccggtcatcgcaacgactttaccatgtttttgccaagctctaacaatccgcaccttatgttctggcgcaactcgcgcataaactgcgtactgactgacttttttagcaaatgtctcgtcatccatttgatccagttcggcacctgtcacaacggccgcatccgcatcttgttcaggtgtaataatccctaaacgaagggcgatggcttctgcagtatcccggtgatcaccggtaatcattaacgtccgaatccctgctgaatgcgcatcagttacagcttgtttggcttctggtcgttctggatcaatcatcccgactaaaccagcaaagattaactcatcttcaatcgtcggatcaattgttgctggtaagctatctaacggtttatacgctaatgccaagacacgtaacgcttgtttagctaaatcgtggtttgttttgagtaaaaattgccgttcatcttcatctaacggttgaacatcgccattggcatcaataaaatgactcacgcgtttgagtaattcatccggtgcacccttagtggtcattaataattgaccatctttggcttgatgaatcgttgtcatcagcttccgttctgaatcaaacggtacttcacccacgcgtggtgctgctgctagggcatcttggatcacgaaacctttatcacgcccataagcaattaaagccgtttccgttggatcaccaattaactggccatcctctgtgattttcgtatcgttggcaaggttcataatgcttaacgctaaatcatcgcctgccaagtcggctgatgcttcttgcaactgattattggtaaaaatcttttctaccgtcatttgattcatcgttaacgtcccagttttatcggacgcaataatgtcggtactccccagtgtttccacagcaggtaacttccgtaccaacgcatttcgtttaaccattttctgtgtcccaagggctaaaataaccgtcacaattgccggtaatccttctggaattgcggcaaccgctaatgagattgaggttaataacatattaattggtgattgcgcgtggcgtaagtagccgaccacaaatacaacagccgcaatgattaaaatcataatcgttaaactcttaccaagttgacttaaattcatttgcaatggtgttgtggtttcaccagcttgatttaacatcccagcaattttaccaacttcagtttgcatcccagtgcccgtcacaaccccgacaccacgaccgtaagtcacattactattcatgaatgccatgttggtccgatcgccaatcccactttcaggatcggttaacgttgcaacagtcttatcgaccggtaccgattcacccgtcaaagccgattcctcaatcttcaaagccgctgattctaacaagcgtaaatcagctgggacgatatcgcccgcttctaatagcacgatatcaccgacaaccagttcttcactcttgattttaacaatctgcccgttacggcgtacatgtgcgtccggggttgccatctcttttaaagcatcaattgcttgttccgctttggcttcttggaaaacaccaaaaacggcattcaagataacaacggcgagaataataatcgcatctggccattcatgtgctaaaaagccggcaatcattgccgctactaataagacgataatcatgaaatctttgaactgttctaaaaaacgaacgaacaagctttttcgtttagtctcagtcaactgattacgcccgtatttagcgagtcgttcagcaacttggtcttgcgttagcccatcagttgttgtggctaaactttttaaagtctcatccgttgattgggtaaagaatgaacttggttgatctgtcattgtcgtgcctcctatagatagatttcggggtaaaaaaagagacctatagagaattcaaagaatcccccataagtctcactaattaagataacaccagaatattgccttgttggtggcgttatcgcagacaagctgccagttactcccttatcgttaaactaattataagacagaaccaatctaaaacgcaagtaaaacattattctgacgtccaattaatttagcggctaaacgaaatccagccgattaacgccaaaatgtatcaaaaacagtaattggtaaatgccgcttgtgcgctgtcttttggtaccacttttcaatcttggtagcagcctcttctgccacttcacgaccctctaaataatcatcaatttgatcataagtgacaccgagtgctaattcatctggcaatgctgggcggtcttcttcaagatcggcggttggaatcttttcgtaaaggtgttttggtgcctttaattccgccagcatcgctttgccttgacgcttatctaatctgaaaatcggtacgagatcagcaccaccatcaccgaacttcgtatagaaaccggtaattgattcagcagaatgatccgtgcctaaaaccgcacccttcatttcaccagcgataccgtattgcgcaatcatccgcacacgtgccttgatattacctttattaaaatcactgactgtcacttctgtttccgccagtgcttgaaccattgcatccactgacgctttgatattcacacgccggacctgatccgcttgcatgaaatcaatggcagccattgcatccgattcgtctgcctgttcaccatatggtaatcgaacagcgatgaattgataggtttcatcacccgtttcagcacgcatctcacggaccgcttgttcagctaaagcaccgactaatgttgaatcttggccaccagaaatcccgaggacgtatgtttttaaaaatgtattcttttttaaataatcttttagaaaatcaactgaccgtcgaatttccgctttcggatcgattgtaggttgggtctttaaggctgcgataatttcagcttgtaaaggtctcatgattaaataccaccttttttaaatgttagattgctaacttttttgaaacgcgcttccttcaacagctttgtccggcaaataagcgctagcgcacttattcaccagacttcactatactcaaaagctaaccgttgaatgaaccactctgattttggacttcttctttgactcttctgatttgggccattttgtgatcccatgtgcgttgtgaaaggtcaactgggtaatcttgcgggttcaagtcccgcttgtattcatcccataacgagtcgagattttcactacagaacttcttaatcgcgccaagttcgggtaatttgtaaacgcgttgcccgtgttcaaaaatcgtccgtagaattggccgcgcattaaagtccgtcacagttttattaatgtacgtgtaatttgggtggaacatataaattgaatcttgttccagtggatcttcatcccaaagcgtaatgtaatccccttcagatttaccatcaacttttttagtgattcgccaaacttgcttgcgccctggtgtggaaactttctcaacattacttgaaagcttgatggtatcgaccatctttccgtcgccgttttcaatcgaaacaagcttatagacagcccctagcgcgggttgatcataagccgtaatcaatttcgtgccgacaccccaaacgtcaattttggcttcttgcatcttcaagttttggatggtcttttcatctaaatcatttgaagcgtaaactttagcatcggtaaaaccggcttcgtccaattgttggcgcacgcgttttgaaatataggccatgtcgccactatcaatccgcaccccttggaagttaatcttactaccaaattcctgagcgacccgaatcgcacttggcacaccacttttgagggtgtcatacgtatccaccaagaaaacacaatcgtgatgcgtttcagcataagcgcggaatgcttcataatcattgcgatagacttgtacgagtgaatgcgcatgcgtcccactggctggaatcccaaaaatctttgaagcgcgtacgttacttgtagcgtcaaaaccgccgatataagcggctcgagtgccccataaggcagcgtccatttcttgggcacggcgcgtcccgaattccaaaacaggatccttgccgacaacggacttaatccgtgcagctttcgtagcgattagtgtttgataattgatgatgtttaacaaggccgtttcaattaactgacattgcgccaatggtccttcgatttgtaaaatcggttcattcccaaaaaccaattcgccctcaactgctgaacgaattgttaaatcaaaatcaagattggctaaataatcaagaaaatcagctggataccccacctcatcacgtagataagcgatgtcactttcggtgaagtgtaagttttctagataattcacgatgtgttctaaaccagcaaaaattgcgtaaccattttcgaatggtaattttctgaaataacattcaaaaactgctgtgcgattgtgcaagtcctttttaaagtaagtaagcatcatattcagctgatacaagtctgtatgcaacaaaagactgtcatcagggtataagtttggcatgttaagctcctaattagagatatatttagtataactatatcataaaataaaagaggcatacaaaaaagacggtagaaaaccgtcttttttgtttgagactagaagaaacgccaaccccatttattaaaatactgtgccatggacttcaagaagatcttaaatcccttgaaactgcggtgggatgccattccataaaaatgagtgacaaccgcgtctggtacatataaaatcgtatgaccgctttggttaattcgatcacaaaggtcattatcttcgaaatacataaagaagcgttcatcgaaaccatcaatagcccgaatcacatcagtccgcgtaaacatgaacgcaccagatccatattgaatcacttgccgtcgatccgttaaatcccggcattcataagccgccaagcgtttttcaaatagcttcttaacccatttaaaaggtacaaagcgcagcatataatcgaagacatctagcttccgccgtactaaatgttgggtcgtaccatccggaccaacaatcttcggcgttagcatccctaagctatcattagcatcttgatccgctaaaatccgatacatctgttcaaatgcgttttgatttaaaataatatccggattgcaaatcagaaaataatcggatgccgtcagcttcaggttggcattatgcccatgaccgaacccaagattctcttggccttcaatgatttcaacatcatctgcagcataggcttttaattgcgccaaatactcaggtgttgacccattatcatgaaccaatacttttaccgggtattgccccaagacagttgccttgatactatctaacgtcttaaagacgtattgactattataggtcacaatactaatcgtcaccgttttatccagattattactcatcatctcatcctaatcaatttttgccataaatttttgtaatgccacttgccaggttggtacttcaaaaccagttgccttgaccttcgtcttgaacatcttagagcgattaaagcactataataaataaaaactatccacaacctgattgggaagggtgtggatagtttttttgtggaaacgtgctttttaattgcaacaccttccgcttaatctaaaatgagccttaatctcaaaagacgagattgaggctcatttttaattaatactcagaggcaaatcgctttaacagcactctatgctttgtcgaagtagattgttgcgattgtgcctaggatgatcatagcgatgatgagtgcgatgggtcctagtagtgctgtggcggttgttagggctggccaggctggtgcgacgccggtttgggcaagaatccagatggcggcaatgacaacgccgagcacaccggcgtaaacgtattcgacgaagtgtgctaataggtagtgcattaatttagcaacaatcacagttccgatgacggccccaatgatgaacggtaagaggagcgcgacgcttttgaacgcttctgtggcttgtgtcaagcgtcctgtgacgaggtagaccattaagtcgagtagttgactgacagcgtgataaacagtgccatattgcttcacaatcatgagcatgattgacccagagacgcctgggatgagcatgagtgatactgagaagaagccggcaaatagtaacgtgccaaagtcttggagggtagtgagttgtttgatagcgatgtcggattcagattggtgaccaccaatctgggtgagtagtagcataattgcgccacagacgatggcgattaacactttttgccagttgagtccggcgagtctacgccagatgaatgggagactgccgacgacaagaccgatgaagaaactgtatgccgctagtggataagcggtgcataaccaaagaatgattttggtggagagtaagacgccgatcccagcgccaatcccgattggccataaaaagccaattgcttggcgccaatcttttttgaattgcgcgatagccgccagaagcggttcgtatagaccaacgataacggcgaaaatgctgccggatagaccaggtattacgagtgcgacgccgattagggcgcctttgagtgcgttaataagtggcataagcggttctcctttttatatgaggggacttttatttggtgggaattgtaacgggtgttgaaggtaatgggacaccagcttcattcaaggcttgcaagtaagcctgtaagaaagtacggttagtggcagcttgttcgccgttagtggtgtgcataacaatctggtaagcaaggacaccatctgcgagggtggttaccccgagaatcgtagggccatcttgtatttcaggatgtttgggcaccagttgcacattgacttcattgacggttgccgctaacagttgtaagtcggtgtcgggtaagatgcgaatgttaatcagaacacgcatatcattgcgggataggttgctgacgatcgagatattgcggttaggaatgaaatttaaggtgccatcgtaactttgaacttgtgtggttcgtaagccaatcgcgttgacggtgccttctaccgtaccaattttaaccatatcacccacatcgaattgttgttctgcgaggatgaaaaaaccggtaacgatgtcgttgacgaaaccttgtgcgcctaacccaatggctaaactgaagatcccagcgccggcaatcaaggtaccaacaggaacgccgagaacgctgagtagcgcatagagatagaagaaaatcacgaggtatgaaaaagcgttgaccatcaaagtataaatggtgttcatgcggttacttgagaaaccatcagttttgcggtattttctgaagctgcgcttaatgatgtatttacctaagcgattgatgaggtagaataaagcggagagtaggataatttgaaacaatccagcaacgagggtgctgagtaatttatcccagtcaattgaagtgatgtagcgcataaaaatattggtctgtttctgaacagattcgaccggagttggtgcggccgctaataaacgtgtgaacatgcgtgaaactccttttttgtagcatgtctttagtttagcaaatgtcagaaaaaatggcacctaatatagtgaagataattgaaggttaagggaaataatgctattctagtctttaagaggcaatgtaatagataacgaagtaggaggaacaaatcaatgacgggtggtcaaattgcggcgctaatcgccgcaggggcttttgcggtcctagttgtttttctaatagtgatgctattaaaagtcacaaaagtattaacggatgtttctaagacagtaacggaagccaacaagagtgtcacggttgttactgagaatgttgatattttatctaaagaagtagaaggtttactcagcaaagccaacgtattgctagacgatgtgaacgggaaagtcgctgacttggatcctgttttcagagcggctggcgaacttggcgagagcgtttcaagtttgaatacggcaagtcgcaatttaacggaacatgttaccaacgttgggcggacaaccgctaaggcaacggtcgcttcgaaggttggcgcaagtgcattaagattttaccaaaatcgacgtcaaacaaaggataaggagtaattctcatggcaaaaaaaggacattttctattaggtgtattagtcggtggcgcagcagccattggtgcaacattaatgttaactcctaagacgggtaaggaattacaatcaaaattagtggacttaggtgatgatttaatggatcgcgcacaagactactactatttagcaagtgaaacagcagcagacttaaaagacgacgcaaagctacacatgaatcgcgtccatgattatgcaagtgattggcaagacaatgcgtctgatatcaaagaacaagcaaaagcacaatttgatgaaaaaacagcagacttgaaatcacaatttggcggcagccttgaagctagccaagaagatttcgacgatatcgtgatcgacggcaagagtgcatttggccaagccaaagacgaagcatccgccgctgttgaaactattcaagaagaagtcactgacgataaataatcaatgaaaaagcccctgccaagcctgatttagcgggggcttttttgcttgtttgaattgacgactagtgcaaattttaaaagtcggtgttataatgaaaacatagaaaaagagccgtgcgacaacacgactcttctccacagtccgcttaagacggtggcaagtttttggtaaaaaataaccgtgactcgtcaaagtttagacggttattttttttgattaaatttcagaatctcaataactaacatggcaaccgaaattgccaacatcagtgcgttgaaaaccgacatgttatcctttctcaaggtaacgcttaatcaacataggcatcacctcatttctgagcgttagccaccgtcataaacttactgttaggattactgtaacatagtttgaatggttaacgactagggattataaagttctttaaaacaaaaggcaggcgaaatcattttgtgatttcgtctgccttttttaattagtgctcagttgctgaccgcaattaagggcactcttattgaaacgtgctgtttcaaactgccttttccggttaaccaaaaaacgcgaatcatgacgaaaagcgtcataatccgcgtttttaagttaatcctcaaagccaacccgtttgaatcagcactcttagaatgtttgtagttcttttgtcatgtgtgtgaaggcttctgatcctgtttctgttacgtggacacagtcttcaattcgaacaccggcaacgcctgggatgtagattcctggttcgattgagaaacacatgcctggcttgataatcatgtcgttgccttccatgattgatgggaattcgtgttctgaagttccaatgccgtgacctagacggtggatgaagtattcgccgtagcccgctttagtgatgacgtcacgtgcaatcttatctaattcagccgctgtgataccgggtttgattgctgcttgggcagttaagtttgcttcaagacagactttgtggatttcgagtgatttcgcatcgggtttgccaaaagcaacggtccgcgtcgcatcactcatgtaacccttatgcaatgtcccaaggtcaaagagcacgagggcatctggggttaaaatgttggcttcggggccaccatgggggttagctgcgttgatacctgattgtacgatggtatcaaaactcatatgcataacgcctttgcgcattaatgcgtattcgatttctgcaacgatatcttgttctgttttacctgcttttaaggcattgaaaccaacttcgaaagcataatcggcttcacggccggctgcttccattaaagcgatttcttcaggtgttttaattaattttaagttttccatgaaacgtgaagcgtcgcctgggaatgttgcgtctgggaattgctttagaatggcttcgtaacgttgaacaggaaggtcgtctttttcaagtgcccaacgtgtagggttcgcattccgtttcttgatttgatctgcgatgattgcgtatggatcttcgtgatcgagatagccgtaaacgtcgagtttccagccagcttttttagcagattcaacttctaattgtggtgtaaataggaatgggtcctgatctgcaaaaacaaagagggctaagacccgttctgcaggatcactttcgaaaccagtgaaatagaggatgttggttggattactgatgtaagccacatccatattattctcaccaagccaattttgtaattgggctaattgattattcatctaaagcacttcctttacaattgatatcactagtatatcacaaccaatgtaaacggtaatgtaaaccacaaatgaaaacaaaaatgtaaatttcatgaaaattagtgtaaaccgcttgcatttgctttaaatctctgttaaattaatcaagaagtaaaatgaaaactgctgaaaatataatctattttattttacaaatgaaaggaatcagttaatcatggaaaaacaaacaattacaatttatgacgttgcgcgcgaagccgacgtttcaatggcaactgtctcacgagttgtcaatggtaacccgaatgtgaaacccgcaacacgtaagaaggttcttgaagttattaaccgtcttgactaccgtccaaatgcggtggcccgtggattagcaagcaagaagacaacaacggttggggtcatcattcccgacgttagtgacatctattttgcatcacttgctcgtgggattgacgatgttgcgacaatgtacaagtacaacattattttggctaactcagatgaaaacaaccaaaaggaagttcaagtgttgaataccttattggcaaaacaagttgacggtttaatctacatgggccacagtatttcagacgaaatccgcgctgaattctcacgttcaaagacaccaatcgtgttagctggttcaattgatccagacgaacaagtgggtagtgttaacatcgattacgttgccgctgttaaagatgcaactttgaagttaatcaaaaatggtcatgacaaagtggcgttcgtttgtggtagcttgaaattcccaattaacagcaagtatcgtttatgcggttacaaggatgccttgaatgaagcaggcattgcttatgacgaaagtttaatttttgaaacagaatacagctacagtgctggtgaagcattgttcagcaaaatcaaaacaactggggcaacagctgctgttgtcagtgatgacgaattggcagttggtgtcttgaacggggcagttgatgccggcgttcaaatcccagctgaattcgaagttgtgacaagtaacaacacgaagttaactgaaatggtacgtcctaagatgacgtcaatctcacaaccattgtatgatatgggtgccgtagcaatgcggcttttaacaaagatgatgaacaaagaagacgtaaacgacaagacaatcctattgccatacagtatcgtagcaagagaatcaacaaaatagagtgctattggttgcggtcaacaattgagcattaataaaaaaatcccgttaatccaggttttaggattaacgggatttttagattaagcggaagttattgcaaacaagagcacgtttccaccaatcaaaaaaggcctcagttccaaacgattttaaatcgttagaactgaggcctttttttagtttagttcgttgtctctgtatctgttggattggtattcgctgtataattcgtaccggttgtagtgccagtcgtagcagcagtaccagttgtgtttgctgtgtaattatttgtcgttgttgctgcggtgccactgcgacgactactgtagccactagttggatttaattcatcagcggtgctataggtaattgaaccatagccgttgttataacctaaatagtggttccagaaagtttcgtagttccgggcagaaccgccaatcccgaattcatagctagttgcttttggcgtccagttattataaagcgaggtgacggttgaaccgttcaagttctgtgagctgccgttgattgaaaccgtgccaggtaattgaccagttaatttcaagactttgctgcttgtgaccgtacttggcttttcatgatcatcttccaaacgcatgaggcttgggttgatctgataaacgctgttggccaattttgaccagtatctttcattaatctggcttgagttgtcagttaagttacgaccagtactgtcataacccatccatgaagcgagggtgatcccaggggtactcccgataaaccagatatcgcggttatcatttgaagtcccggttttcccaactaagttgttggtattaaagtagagttgatcgtaaattgaagtagcagtcccatctgttaaaacgccggctaacatttggttcatgatgtacgatgttgcttttgaaaagacgcgtttcttcttagcgtgatgttggtaaacgacattaccggcgggatccgtaatcttttcaatcacgtaggcgtcggtatgttcaccttgatccgcgaaggttgaaaatgcactggcctgttctaagacgctgaccccatcactggtcccaccaagtgaaatccccagttgactgtattcatcagcggtgaggttgatgcccatcttactcatgtacttagaaggatctgttgtgttcttcaaagcgttataaaggttaacggttggaatattcaatgactgggctaacgcttcgtcagctggaatgaatttgttctggatcgtgccaccgtaatcggttggtgcgtaatccttgaagttggtcttgaaatcggccaacatcgttttagaaccaatcagtttctgatcgattgctggaccatagactaacaatggcttgatagttgaaccaggagaacgtttggtcaacatgtagtttgtttgtttgagggagaaatcacgtccgccgacaaaagaaatcactttcccagtgcggttatctaacaagacgctcccgttttgaacaggggacgaaacggtcttttgtaaccccgtttcttcgtcagtaacggtatcggtataagtccgtccgaatgttgcgccctgttggtgaacaaccccttgcatggcatcgtaaatttcttgatcgatagtactgtgaatttgatagcctttagtgctgagtaattcagttgcttgtgtttcatattgtttgtagagatttggatctttgttaagtttggcagttgaaacattggcttctttggctaactgtttggccataatatcagttgcttgtgtttcaagtaagttataaacatagccataactcttcgttgtttcggctggatcggcttttggttggaattctttggttaagtcgactttcttagcggctttgtattcagcctttgtaatgcgatcgtcacgatacatccggaataacacggtatttttacgatctagaccatattttaagtattcaggatctttaagggtgccgtcttgatcatatggtgtatagacggaaggactctgtggcagaccagcaatgtaggcagcctcggctagagaaagatccttagcatttttgccgaataggcccaatgctgcttcttgaacaccagcgatattttgtcctttattgttacggccaagagtggcaacgtttaagtagtcttgtaagatttcttttttagtgaaatacttatcgacccgcaaggcgagcaagacttcggttgctttccgtttaaaggttacttgggaggttaaaacctgcatcttaatcaattgttgcgttaaagtcgagccaccggtttgtgaaccaaacccagtgacatcggaaataacggcccgcaagagtgctttggggacaaccccatcgtgtttatagaaatcctcatcttcggttgcaacaatcgcatcctttagataaggggatatctcatggatgttgatgggagtccgaattaagtcggttttgattgcgccgaacttattgttcttggcaaagtataaaccggctgcttgatcggtattatcaagttgttgctttagcacttgatacctaggaattggttcggatttcattaacgcagcaaaatagcccgcgccaattccagcagcgagcgccatacagattaagccaattgagatcccatagagaaagatactcttaatggcttcaaagaagacgttaatcttaaaagagagtggtgattggctcaactcttggatgtaggctcttttttgttccttagttggttgtgcagaacgtttatcgggtaaatggagcaaatgtgcgagtctgtctttagcagatgtcaatagcgttgagaccttttgtctgctcgacttgagcagtgctcgccatcgactggaacggtgctttggatcattcaaataataacgccaccttttttctcatactgtcccatattatataatagttcagcgcattatcatacccgatttcggatttgtaagacaaatgaaaaatatccagaaatgcacggcaatcaatgaatatagtgcaattggttaaccaatttgaatcagcagacacaaaaaggggggcgtttgctagcgattaaaagtaagcttttaacgaaatgccgtgaaaacgctaaacgttaggtataccaattatttagcgcgttttttagcgtcaaaaggcttgcaattgaaattttagccgtttataattggactataccaataaacgacttgaatttttaaatgatgaggagataatcatgatgaaaattattaaagtgaaagatcaagtagaaggcggccaaaaaagctttgaaatcttcaaagaaggtttagcaaacaacgctaaagtattcggtttggcaactggtagttcaccaattaaattctacgaaacattagtggctagcgacttagatttcacaggttgcacatccgtgaacttggacgaatatgttggcttatcagctgatgacgaccaaagttaccactatttcatgaagaagaacttattcgacaagaaaccatttactaaatcatacttaccaaacggcttagcaagcgacatttctgctgaattaaaacgctatgaccaagtgattgctgataacccagttgatatccaaatcttagggattggccaaaacggtcacatcggcttcaatgaacccggtgctgcgtttgacagcaatacacaagaagtgcagttaacagaatcaacaatcaaagctaacgcacgtttcttcgaaaatgaagcagatgtaccaacaaaagcaatctcaatggggattggctcaatcttaaaagctaagaaaatcgtcttgttcgcatatggcaaatcaaaagccgaagccatcaaaggcacagtagaaggcccacaaacaacagacgtcccagcaagtgcattacaactacacgacgacgtgacaatcatcgtagacgaagcagcagcaagcttgttaagcaaatagagtgcgacagcaggcggttatgctctgaggattagtggcatatcgtgaatgagcggcaaagccgatcgttttcgatatgtaactaaccggaagagtatgcctgatggagcccgtttcaaaataagagtgcgtttgaaacgggtatcttccgagcattaactggatttgacgaattgacgatgaaatcgtcgatttgccaaatttggttaagcgcaggaagatgtttcaaaaagcccgtttcaaaacagagtgcgtagccagctgggtatatcccgaggattaacacaggatggcgaatgattgcgtcagcaatcgtttgacattcagggttaaccgcaaggatatggatgacggagcacatttccaccacaaaaaaatcccccacatcaaatcacgatgtgggggattttttgattgcattatttcaatgttgccatcactttagccattgcggcttgttgataggcaattgctgcttttttagcaaccgcttgttgttgatcagcagtcattgctggattggcttgcatagcagccatcacagcttgtttaccggcattttctgcgccagttttaagttgtgcttgttgaccttttaatgttttagcgagttgtttagcttgaacatcacttagaacgaaccagcctttagcaaccttaaatgtgttgtgacgacttacgaattcgtggtcgttaccagaaattccgaaccagaatttagccgtattattttgataaacgcggtatttggtggttgtcactaagactgctttatcagcatttttttgaacactgttggttgtcttttcagtttgggttgctttgggtttactttggttggcatcggtccgataaagatagactttttcagtgccgttaccaagtgggtgatagagaagcattgacatgcccttcgcatctgcgcttgaaacgagcgtgtgcgtcttagtttcggtcacagttttcattccgtaatgattgtgatcattttggacgatgaaaacgagtgaagcgataaatgtgagtccaaagatggtcattaagattggtcgccacatcttttgaccgaaaatcgatgaaaagaataatgcgagtgtgctgataacgagtgtaatgacgatcatgccttggcacctccattaatcgtagatttctttgaagagaggaagaatgtgatgatgaagccaatcacacagaaaatcacagcaacgatgaaggctgcgtgataaccagaaagggtggcatcaatcatcttatcgcggaaggccaatggtaatgtcttgaccatgtgtgtgcttggcatattgccttttgtaacactagaaagcacactgattaagatggctgtcccgattgagctggcaacttggcggaaagtattattaacagctgtcccatgactaattaagttcattggtaaagcgttcattccggaagttgtgacaggcatcatcaccattgaaatcccaaacatccggacagcgtataacacaacgatgtagatgattggggtagtagctgttaggaagatgaatggcgcagttgcagccatcaataagaacatcccggtcattgctaagcgtttggcaccatatttatcaaaaatacggcccgtaattggcatcataatccccatcatgagggaaccagctaataacgttaagcctgaatggaaggcagattcgccacgaatgttttgaatgtatagtggcaagaccatttcggcaccgaccatcgccatgttcgtcacaccacttaaaatagcggcaattgtgaagacaggtgatttgaaaacgcggagttccaagaatgggttttccatcgtgagttggcgccagatgaataaagcaattaccacaacgccaattgctaaggttgtgagaacgagcgcatcgccccagcctttatcgccaacttctgagaagccataaagcaagctcccgaagccgacagttgataaaataattgaagggccatcaattttaggttttgaaagttgaataacactcttcatttggaaactagcgaggactaagacgagaatcacgattggaataatcatgccgaataaaacacgccagttgtatgaatcgataatccagcctgaaagggtaggccctaaagcaggtgccaggccgataacaatcccggccatccccatggctgttccccgtttttcaggtgggaagatggtgagcataatggtttgcaaaatgggcattgaaatcccaacaccagcagcttgaacaagccggccgattaatagagttgcaaatgagctcgttggtgcgatgtaacagataatagtcccgattaagaagacagtcattgctgacatgtagaggacttttgaattgaatcggttaattaaccaagcactaatggggatcataatcccgttgactagtaagaaaccggttgtgagccattgaacggctgaggtggacacatcgaatgctttcattaatgtggggaaagcagttgataaaatcgtctggttcaagacggtacagaaagtaccaatcaataagaccaagactaagactgtccgattatatggtttcccatgaatatctaatggtctagcgtctgacaagataaaaatctcctttgtgtgtttttgttgatgcgatttattagtttagacgcatttggtatctttgtcaagtaagttgacaaaggtgttatttaacttgacaatcccaatagattatctataatgaaaaataataataggaatggagtggggacttgcaaaaagacctttttttaaagttaatagatacggatcgattgatttttgggattagtgaagtttgtaaaatggcgggggttacaccgcgtcaactccgctactgggagcaaaaaggatacattaaagcgcgtgaattggatggcaataaggcccgcgagtacgacgcgcaaacaatgattaaggcgatctttatcaagcatttcttagatgaaggctacacgctaggggttgctgtacagaaaattcaaaaacacatggataacatgaaggttgttcgttcgataattcgggaacattttgaggggattgaagagattgatggcgaaatggctgttaatctcggttacttcgatgaaacaaagcaacaaatcttatacgcaattgtcaaagatgggcattcaacgtttaagctgatgcctgctgataaatgaaggcaatcaaaaaaacggtccaaagcgattaagctttggaccgttttttttgattgctaaatgtgttctatcagccatatccttccggttaaccctgagccgcaaacgattgctacgcaatcattcacaactttgtattaatcctcggtggatacccgacttacgtcacactctaaacgtgtttcagcaggcatatttctgcgcttaaccaaatttgcaaaatcagcgattgcatcgccaattcgtcaaatccagttaatgctcgaaatataagcgcctgcttacgcactctatcttgttaatctgtaaattgcatctgcatagattgcaatggcattcatgatatcttcaatgtgcatatattcatttgcttgatgcatcacattttcgcgttcttctggtaaggcaccgaaagcaacaccacgttctaagatacgaccatatgtgccgccaccgataacttgttcgtgacctttaagaccagtttgttcttcgaagacgcttaataatgttgcaaccaatggatcgtcaccaggcacgtaatgtggttcttgtgcatgaccgtcaattgttacgtcagcaagatcactaagtgtgtttgctaaaccgtcgcgtgtgctttcagcagtcacacctttaggataacggacgttcaagagcactgttgctacaccatcttgtgtgtagttgaagactgcaggacatgctgttaagtcgcccatcacatcatctgtgtggttgatgtttaagaggtgcccacgtgaatcttcgtgcattaagcgggcaattgttccgatgtagttgccacctttagtatctaaggcaaagtcagctaagaaagttgccaagtgtgttgcagcatttacgccggcttttggttcttgagcatgtgaacctttaccgattaagtcgatgattgtttggtcaccgtcagttgtgattgtcccttgtaacttgtggtcggcaacataggcgtcaaacttagcttggaaatcagctggcattgcacccgttaagatggctttagctgtttgtggcaccatgttggcgcgtaaaccagatttgaagctaaccaatgtcatatcgccatcagcaccgtcaactggtttgaaagtcatgaggtatgacacaatccctttttcaccattgatgattgggaagtttgcatctggcgaaattgcaaagtcaggttttggttcaacttcgaggtaacggttgatcccaacccattcactttcttcgtcagtcccaacgataaagtgcacttttttgtttaattcgataccgttgtcttttaataatttcaaagcataatatgctgcgattgaaggccccttatcatctgatgaaccgcgggcataaatcttaccgtctttgatcactggttcaaatgggtttgtttcccaaccgtcaccggcaggcacaacgtccatgtgacctaaaatcccgaatatttcgtcgccactaccgagttcaatgcgacctgcaacgttttcaacattctttgttgtaaaaccgtcgcggtcagcgattgctaagaattgtagcaaggcatcgcgggggccagggccaagtggtgcgtcgtcttctttatggtcaacgtcgcgcgcactattaatcttgagtaaacttgttaagtcagcaagcatttgatccttatactttgctgcttcttgttgccaattcaatgtcattgcagtcccagctttcattgttaaattttaaccaaaaaacggttaattaattattaatctattcacattttagcatattattacagatttaaaaagcgcttgccattaaaaaataaaaggttcacaaagtctccatgaaccctttaaggttagtgcttctttaaaatccgaagtgcgtttaaaatcgcgattaacgttaccccgacatcggcgaaaacggcttcccacattgtggcaattccaaaggcgcctaataataagaagatgcctttgaccactaatgcgaaaatgatgttttgccaaacgatgcggcgggtgtacttggcgatcgaaatcgcagttgctaattttgtcggttcatcggacatcaagacgatatcggcagcttcaatagcggcgtcagaacctaacccgcccatagcaacgcccacgtcggcacgggctaaaacgggcgtgtcgttgattccgtcaccaacaaagacgatttttccgttggtagcgcggtcttctgtgagtttggcgatggcggccactttatcttgcggcagaagttcgctttgatacttatcgatacctaagacggcgctgacttgttgcgcaacgggttggttatcgccagtcaacatgattatttgatgaatcccggcgtgttttagctgcgcgacagccgtttgtgcatctggtttgacggtgtccgcaatgacgatataccccaagtagcggttgttgtaagcaacatggacactggtgcccacttcactaggtgtgagtgttgcaatgccactggcttgtaaccaactagccttaccagcttgtaaaagttgtccgttgagttgcccgctaatcccgtgaccagcggtttcttggacgtcagataacgtctttgtgagtggcgtttggttagctgctaaaatcgattgaccaattggatgggtcgagtgttgttcgacaagggcagctagtgctaaaagttcatcaggttgttgatcgaccgaatgaacggtggtgacgctgaaactaccttgggtcaatgtcccagtcttgtcgaaaacaacggtttggacatcgtttaaagcttcgagataattactccctttaaccaggatgccgtttttagaagccgttccaatcccagcgaaaaagccgagtggaattgaaatgacgagggcacatggacaagaaatcactaagaaaatcaatgcccgatagagccaatcgccaaatggagcaccgaataaaaggggcggtacaatggccatgatggctgcaatgccgacaacaattggtgtgtagacttttgcaaaccgcgtgatgaagttttcagtaggcgctttttgactgcttgcattttcgacaaggtctaaaatcttagcgatggttgaatcagcataaggtttcgtgacttcaagcgttaataaacctgattggttaatcgtcccactgagtagttcatcaccaggatgaaaggcgcgaggaacagattcaccggtaatagctgaggtgtccacgtaactgtcgccggtagtaatcacaccgtcgagcgggactttttcccctggtttcaccacgatgtgttcgccaacctgaattgcttcgggtgcaacaacttcggtggtgccatcagccgctaaccgattggcgatggttggtttaattgccactaagttagcaattgagcgccgggaatgattaaccgctaatgattggaaatattcaccaacttgatagaataacatgacaccaacggcttcggcatattgtccgattccaaaggccccaatggttgcaattgacattaagaaatgctcatcgaaccattcgccgtggagaatatttttgattgcggtccagacgatatcgtagccgatgactacaaaggcagctaggagcaacgtggttttagctggcgcgcttaaagggaccagataagaaatcgccaagcctaaagagctgacgagaattcggatgagatcataattaatcgcatgttttgcgggggatggttctggggttggtgattgttgaatccccacatctggttcaatggttggcaaaagagtagcgagttgttgttcgaattccgtaacagcttcttggccggtgagttcatagtttaatttttgagtggtgaaattgacggagcaacttttaacgttggccatcttgttaacgttcttttcaattttagtagcacatgcggcacaatcgatgccgattaattgaagttgtgccatgttatttaggcctccttgttgagtgaaaagctaaatcgtaatctttactaaataaacaaacgtatgagcatatattcatatgttgactataagataccaccaaacacgatagaatgcaatcgagatgatgggtttgggacataaaaaaagcaccgaccaaagtgaatttgatcggtgccaataggatccttagtgttcgttgacgtgggcgataacttgcgaaaagatattgatgacatggttgtcagctaatgaatagaaaacttccttgccttctttacgactttttaccagtttcgcttgcttgagtgcacgtaattgatgtgaaattgaggattgcgacatctctaacacactgacaatatcgctcacccgcaattcggattgaaagagggcgtacaagattttagcgcgtgttttatcgcctagtattttaaaaagaattgagatgtgatcaagtgtttcttcctttggaagagtattttggacggaacgaatcaattgttcataatctgatgtcataaaaggtgacctcgttagaatttaatggtagttagttgtagagaacgggcaaactggttaaacagttgcgcgtcgactggtggttgttggggcaattgcagtggcagtggcagtgctgggttaatcagtaagttggttggccgcaattgttggggaatttcacggtaaaagtgggttaccatcagcgattggtttgggttgaagtcgattaatgcttggcgactcttgaaccaaccactagcgactttcaaccagacttgattaccaacatagcgcactcctaaaatttgctgttgtgaattggcactaagataaccggttgtctgggtggggtgtagcggattattccaagtagcgacaatgttcgcagttggtttaatctgcgccgttttacccaccaataaagcagcggctttcgctgtttcaccgacgttgatgctgtcgctgaggacaaagcggttagtgccaatgcggtagtaagtttgatcggcaattgtaacggcttcggtgatgttgtagatatggcccgctttagccggctttttattgagggttggttcatatggattttcaacggtggggaggtcttgaacgtcattgacttgcccaattgtgtcgatggcttcactttctgcttgatcctgtgcggcctgatagtggcgtcccagtgccggatagttcgtgaccacgccatcgacatttaggttgactaaccagttccaagtcgcttggttttcagacatctcattccagacatacactttttgatggagataatggagctgtttaatgatggttggggtgacgagggatgatgagatgttaatcccgtcggcgtatttaaaactctcgaatgaaatccgctgtaaactgccaacgataaaaatgcggggaatctctggcattaaacgttgcatgttttgcagactagcgagggaaaaggaatggaccataacgcggtcttgcatgtgatattgttgaatcagcgctacgagttttgcttccatgtcctgcggatttccctttttggttttcttggtttcgatgaggaatttcgcatttgggttgttttgatagtgctcaaataattgatcgacgctgtgtggtggttccccgttactcattttgagttcactgagcttggcaaaagtattttgcgaaacaatcgcatcggtccccgtgacgcgttgtaagttacggtcgtgggagatgactaagacgccatcttgagattcgtgtaaatcgagttcgacatagttagcgccttgcgaaaaggccatgtcgatactttgaaatgtttcttcgggtgcgttgatggggtcgccacgatgagcgacaacggtaaaaccggttaaaaaccagaaacaaaggcttgttaatactaaaagcccccatcgtgaatgttgctgtgacaaatcaatggcctcctcaattgataaaaactactctttttaagataccattattcctttcaaatgcctacgattgttacagaactttaaagaaacggataaataaattaaaaataacaattgacaacgcttacattagacggtatattatgtttgtaaggtacttatgcaattacctttttatcaattctctttctctcttatgccaaccactatctgcgggtagtggtttttttgtgtacatattggtagaataaacgtaactgaaatcggattagaataggaagtaacacaatggcggagaagtaccaaacatttgatattattgaagaaattacgcgcttagatggcacaacgtattatgaattggctaacatctttatgaatgggcgtgccgaactagcggctaaccggggatttattaagcaagtccggattttacaactcaacattccgcattcgaatgcggtccaaacttacgaagcttacattaatgaacgttacacaatgcctgcggttgattttgaccactgggaagaatggaaaaaagaagacggcgcagttgcgcaagcctttcaggagattttaaaagcaaatcatattggttaggtgggattgtgaatgatttatttcacagcggatacgcatttttttcacgccgaattattaggtaataatgattttgcgccgcgtccgtttaaagatgtagctacgatgaatgcaacgattattgctaactggaatcaacgggtgcaagctgacgaccaggtttatttgttgggtgacgtcgcaatggtgcccaataagccgagtgcttttgctgaagtcgctgctgtgttagagcagttgaatgggcagctgattattattaaaggtaatcatgataaccgtgcttttttgaaatatttggcgaaacatgatgcgggattatcagctggcaaggcgcattatcaatttgctgatgtcggtgagctaattaagatcaatcaccatcagtattttttaacccactatccgttattattgggaaaggtccaacagacgttcaacttgcacggacatattcatcattatatgttgccgattgcagagaatatcaatgtcgggattgatgcaccagagcgcgaattattacctgaacgggtgccgtttggaacaccccttgcggcaaatgagattgaaatcatttttgaacgcaaacaagccgcgctggcaaaccccagccacgactagctgaagggagtaagcaaaatggaaacaattcatattttacacacgaatgacttacattcacattttgaaaattggcccagaatgcggcgcttcctcttagaacatcaagcagcataccgaaagcaaggggatacggtcttgaccttcgacatcggggatgcaatggatcgtagtcatccattgactgaagcaacgaatggtcagattaataccgagttactcaatcaaattgggtatgacggagtaacgattggaaacaatgaaggaatcggtaatagtcatgctgatctggaacatttgtatgataaggcgaatttcccggtattactggctaatctgtatgaacaagcaacaaacgaaaggccagcatttgcgcaatcttaccgactaatgacgaccgatgctggaacgcgggtagcaattattgccttgaccgcaccatttttcttaacttatcggccgaatggttgggaaccgacgactgtcagtgaagagttgccgcggcaattagcggcgattgaaggtcaatatgacatcttaatcgtcctatcacatcttgggattacgactgataagtggctggcggaacaattccctgagattgatgtcgtctgtggtgcgcacacgcatcatcttttagaagaggggctgctggttaatcaaaccttattgacggctgccgagaagtacggtcattaccttggtgatatcacgcttgaactggatgatcagcaccatgtgatgcataaaagtgctcggacggttttaaccgcggacttaccagttgtgaagactgacgcagcagaaattgaaggctacctgaaaaaggggcacgcacaattagccgccgagcatgttgccaagttgccacacgcttttaaaatcaacgcaattggtgaatcagaaatgatgacgaccggtttaaaggcaattgaagaagcgaccagcactgaagctgccgtattgaatactggcttgttcttgcaagatttgcaggctgggattgttactaaagatgatttgcaaactcaattaccgcatccaatgcatctgattaaagtgacgctcaaagggtatgatttgtggcggatggtgcttgaaatggagaaaaaccggctctttttacgcaagttccctattaaagggatgagtttccgtggtaaaatctttggagacatcgtttatgacgggatagcggttgatatgaaattgcggcgcgtcttttggcatgggcaagaaattgatccagaagccagctatacgttgacgaccgtcgatcattatctattcattccattctttccaacaattgagattgttggcgagaccgagatcgtgttccctgattttctcagagacgcggtcgctaaatatttaagtaaacattatcccttataagggaagaggaggttcgctgtggcggatacgaaaaacagtcccaagattgccaagaaagtgaccaaggcgattgaaaaagaaatgatcgcttcagccaaacaaccggaagtgccacaacacgttgtcatgaagactgaaaccacgcttgagattgataaatgtgcttatgaagtcgttgtgaactatcgtgaaggcttcgacgctgaaaagttgaacgaacgctataatgaagtgttggctaagtacgattatattgtggctgactggggctttgaacaactgcgtttgaagggcttttacaaagcaaccaacaaacgcgctaataaagatcaattaatcaatacgttacaagattatctatacgaatactgcaactttggttgtgcctactttgttttggaacgtcaaggcaagccaatcattaagaatgagaatcggcggagtaatcgccaacgtggtcagcaacggcgtcggcgtcaaaagccaggttttacagaacggaaagtcaccgataacaagcaaaaagtgactaaagaacgccctcaaaaggcggtaaccgagaatcaaaaatcagttaataagcgtcattttaagatccgtcctttggaacacaataaaaagtaaaacgtaattggagttagacaactatgacaaacacagattatgcagggtatttaattgatttagacggcaccgtgtatcgcggccgtgatcggatgccagaagccaaagatttcattgaacgcctacaagcaaaacaaattccgtttatgtttttgacgaacaacactacgaaatcaccagctgctgtgattcagaatttggcggataaccatgacattcatgcgacagttgaccaagtgtataccccttctttggcaacggcgcgctatctattgaatttaaacggtggtacagcgaatggcaaaacggtctacgtgattggagaactcggtttgaagcaggctctatcagatgccggttttagaaccaatgaattcgatccagactacgtggtagttggtttggattatgatgtgacttatcacaagtttgaattagcaacgttagcgattaagcgcggtgcattattcatcggcaccaatgcggatacgaatttaccaaacgaacgcgggctagtgccaggtgctggttcagtgattgcgatggttgaacgggcaacgcaacaaagtgcactctatatcggtaagcctgaaaaaatcattatggaaatggccttagagcaattcggcttgacgaaggaacaagtggtgatggttggcgataactacaatacagatatcaaggctggcttgaatgcagggatggatacgttgttagtttacactggtgtttcaacgccagaggatgtggcaaaagaagccttgcaaccaacgcatatcattaacgacctaaccgaatgggacgtttaaagcgggttagaagtaccactagttgggcggcgttgtatttggcgttagtcagcagtgcgattttaataacgttattgttaagctgggcactttatccgctagtgagtcactacctcgatctagcgagtcaacgggaattaacgcaaccgcggctgatgatgaactttaaccggttaatgggctacttacttgtgccatggcaaccacgcttacaactacctgactttccaatgtcattggatggtcggcaacattttgttgaagtgaaacgcttgtttggtttagcagtagttatttggctagtaacgattggagcggcgattcagcattggcggagtcggcgcaagaccaatcgggtttggcaatacgtccgcccaatgcaagttgctcttgtggtgccacccatattagggtttattgctagtatgaatttcgatcggtttttcattacgttccacgaattattgtttcacaatctgaactggcagtttgatccaatcactgatccgattatcttagtgttaccggaagtctattttggcctttgttttgcactcttcttcattttgttagagggtagttttgcttggctgttatggcgcggtaaacgtgcgctataacgtttggctttttattaagaaaatgcaaaagtgattgctttgatgcatggattcggtatcctaataagggatatatttttaaattgaaaaagagtataggagaaatcgcatgacgcagttaattgattttgttttacatattgatgcccacctggtcaacattgttaatcagttcggcaactggacctatgtcatcttgtttgccattatctttgttgaaaccggggcggttatcttaccgtttctaccgggggactcgcttttatttgccgctgctgctttggcagcccggactgataatgacttgaatgtctggctgtttgctgccttgttcttaatcgcctcaattgcgggtgattcattgaatgaacaaattggccaacgggtcggtttagccgccacgaagaatcggttcttcggcaagtttatcaataccgagaaaattgaagaggcgcaggtcttctttgataagtatggtggtaaaaccattgcaattggccgtttcatgccgattattagaacattcgtcccatttgttgccggtgggagccagatggccttcatgaagttcttccgttacgacgtgattgggagtatcttgtgggtgacactctgttgcggagctggttacttcttcggaaacattgctgttgtgcgtgaacatttctcactcgttgtgttagggattatcggggtctcattgattccgatggttatcacagcggttaagagtcaaatgaaaaaaaataatgcttaataaaatactaaaaagtcctgcatcaacggttaaaacgttgatgcagggcttttttaaaacgtgctttagctagcaacttcttccgtttagccacggtttgcaaacggtcggctgtgcggctcattcactaaccgatgctatactcagaagctaaccgctagttaaagcactcttatcgaaacgtgctccataagccaccttcttccggttagctacggccagtaaatcatcgactgcgtcgctaatttactggactaggctaatcctcagaaggtaatcgggcatattgcgcactcttacataatggacgtgctgtgtagtggttggcgtttttctgggtagagattcgttagtaactcagtcacagccattggtgcttcaccaaatccgctggcaattaacttcactttaccagggtaggtagcaatatcgccgatcgcatagatgttcgggatgttcgtctcgagttgttggttaacagcgacttgatggtggtccaatgttaatccccaatcacggagaattcgagtatcagagataaacccatagttaacaaggagtttgtcaattgttagctgctcttgatcggttgatttcatcttatttaaagttaatgcgagttgttggttcacttcggtcaaactatcgattaaaaacggcgtcttaatttggacagttgattgtttgagtgcttcaacgctactttcaagcccgcggaattgatcccgacggtgaattaaatagacttgtttagccactttttcgagcattagtgcccattcaatggccgaatcaccaccgccagcaacggcaacggtttgatctttgaactgcgccatttcttttgcgaagtagtgaatatagtgattttcccattctggatcgtaatcgacagcgagtttccgcggtgtgaaagccccgttcccaacggcaatgatgatgcctttggtgcgtgtcgtgcccttcgttgttttaagaacgaaagtcccatcttcttggggttcgataccttgcacagcagtggataattgcaaggttggttggaaaagtgccagctgttcaattaagttttcggtgagctgtgcaccagagataccactgaaaccagcgacatcatagatttgcttttctggatagagtgttgcgacttgaccaccgagttcggggagactttcgataatctgaacatcggccttgcgcataccagcataataggcagcaaacattccgacagggccgccgccaataatggtgatatcaaagagatgatttgaatcaagcatgagataacttccttaatagtagatttcttaaattagtatactagaaaaaaataaggaaagcatgtttaatgaaataatcgtagtaatttatgaagcaattcgctatcataatgattgtgagtcaaaacaaggaggacgattaaatgacatatccacaattagaccttgcaaactttgcagggccaacagctacttttgacacaaaccgtggcgaatttacagtagcacttttccaagaccaagcacctaagacagtagaaaactttatcggcttagctgaaaaagattactatgacggtgtgattttccaccgggtcatcaacgatttcatgattcaaggtggcgatccaaccggtactgggatgggtggcgaaagtctctggggccaacctttcgaagatgaattcaaccaagaagtctttaacttaaatggtgcattatcaatggctaatgctggtcctaatacgaacggcagccaattcttcatcgtaacaaacgaacatatcaaccaaaacatgttgtcacaaatgccaggtgctggttacccagaagaagtcattacggcttatgaaaagggtggtacaccttggttagattttaaacatactgtatttggtcacgtcttgagtgggatggacgttgttaataagatcaacgctacagaaacaggaatgcaagacaaaccagttgaagaagttatcatcaatcacattacgattaatcattaattttaattgaagaggtgttttagatgctagtaggtggaattgaagcagggggcacgaagtttgtctgtgccgtaacagatggaaaaaatgggatacaagaacgaattagtatgccaaccgagacgccggaacaaacgatgccacggttatttgaatattttgatcaattcgatcatttagatgccattggtttggcatcgtttggcccaattgatgttaacccgaaatcaaaaacatatggctcaatcatcgatacacccaaagcagggtgggaacactatgatatcttaggagcaatgaaagctcattatcctgatacccagtttgcttttacaacggatgtgaatgccgcagcctatggtgaattgaagatgggcgctgctgatggacttgatagttgtgtttacttaactgtcgggacggggattggtggcggtgttgttgaacacggtcagattttacaaggttacagccatcctgaaatcggccacatgttaattcggcaacaaccagaagattcatacgaagggacatgtccttatcaccacaattgtttggaaggcttagcagctggtccagcaatcgaacgccgttggggcaagaaaggccacttattgccggctgatcatcaagcatggcaaatggaagctgactatttagctcaagcctgtgtaaatattgctttaatgctatcgccagaacgaattgtcttcggtggtggggtgtcgaaacaagcccaactattcccaatgattcgtgaatcctttaaacgtcaaatggcaggttatgtgcaaacgcctgaccttgatgactacatcgtgcatgttgcattaggggatgacgctgggattactggggcacttttactagcagctgatcaactttagttaaatgagaacctgagggatgtttcctcaggttctttttacatattatagaagaaattgtataaaaggtcttagccgatagcttgccttttactaactggaaggcttaaaatagataggaatattgaaatggaggaaaatatgggttatcgaattggacaaaagattacaggtactgtaacaggcattcaaccatatggtgtatttgtttcattagatgcaacggtccaaggcttaatccacatctcagaatgtggtcatggttttgttaaagcgttagatgaacagtttaaagtcggtcaagtgttagatgtattagtgttagatatcgatgaatacacacataagattagtttgtcgttacgtgcgctacataaagcacaagatttagcaccacagcgtgctaagaaacactattggacaaatcgccggattcatattgggtttgcgcccattgcagaacgattaccaagatggactgaagaagcgatagaagacttgaataagggtgagaatgtatgagtgctaaagtagccggaacgattatgtataagacagagcaaggacaatatgattttttggtccaaccacaagttgatgcttcttataagatgctggtgaccaataagcaagatgatcaaacaccacttgctgctgtattaattgcaatccaagcacagctaaatattgatgttaacgaattgagattgatcaatttagcgaatattaaccttgaaggtgagaacgtttcgttctttgtctttcagtggggagctcatgagactgatttttataccgaacaattgagaataattagtgaagccggttttcgatttgcgaaccctagtgagttcacggaattactggataagttagaagtcacgagtgtcccgcacttgaattagttcggacaatcggtgaatatctattcaacaatgtacgcttttgaaactttttatatttttattcaaaaaaaagtaaacaatcgcttgacgatgtcttggattgttggtatagtattctatgttgtcagcgagagaaaagctcattgctaacgaaataacgggtcaaacgagattgaataaatattcaaaaaatatttataaaaaataataacactggtcttgaggaacaaggtgcgattcgcaatccgctgatcgatgttttaacatttgaacggggtaatccacaatcgattaatcatcaaggaccacaaaaatatttagcagctgaaacctcgatgacggttaataagcattggggggttgctaaaaatgacattaactatgtgtcaccgaagcaacttattgatcaaatttgtaattccagaaaagtcggtgctaatttattaattaataccgggcttgaatttgacggtgccattccagcattttcacagtcgttattgaagattgtcggacaatggatgtcagtttatggagaagcaatttatgcgacaaatcattatgaaaatcagacctacttggcaagtggcgagacaaccgattttatcaaaggaaactatctgtttgtctatggtttaggtaatataggtaatagtaatgttgtgctgggtggcgaaaaggcgcggaagatagtgtttaatcaatatccgcaacgcgtaactagcatcacttggttagataatcaagcgttgtttgagtttgagcaggctttagacgggacgctaacaatttatgccaatgcttttcaatatgggacacatttaattgatcgcgtagccactataactgtcgaagactagtgacgaggtagaagatgaaaacaaaagatgtaacgattaggtatcaaaaaacagcgacggttcatagtgatcgcaatcaactggcttggcttggaaagatagcagttgggacatgtttcttgatgtacgtatcatatatccaacaaattatggctaatttagctgggcaccctgtgtcggcgattcaaccaagcgttgcgatggttaatgcgactttgtggtttagttacggttggtttaaaccacataaagattggccaatcatcatttcaaatgtcccaggaatcatatttgggctagtaacattaattacaatttattaccattaatagcaaaataacccgggtcaattgacccgggttatttttttgatcaacttacgctaaattaattgacaccctttatgaatggtatggtaccataggcgtaattagaaaagcgaagggattcgggcgcatgcgacgttctaaatggataataatcatcattggtttaggagttttaattggcagtggatggtggcttttagggcatgcaacgacgcaaaaagcgcagcaagtcaagcaaacagaaaatgaacagcccactttttatttgcatggttatggcggttcggctcgttcgactgatagcatgatcaaagctgctcgcgaacaaaagaatgcgacacaggtcctcactgcaaccgttcgtaaggatggttcagttgatttacaggggcgttggttagctaaaacgacacgaccaatcgtgcaagttgttttcgaagataatcgcaatcctaactatcaacaagatggtgagtggtttaaaaacgtcttagtcgcggttaatcggcagcacagcttcaaacgattcaacgtggtggctcattcgatgggcaacttgacggccgtttattatttattgaaccatgcgattgataaacagttaccccgtatggcgaagatggtgaatattgcgggtcattttgatgggattatcgggatggatgatcagcctaatcaaaaccaggttaaaaaggatggccaaccacaaaaaatgaacgcgacttatcggcaactgatgggactgcgtaaccagctccctactaaatcgattacggtgttgaatatctatggggatttaggcgatgggacgcattctgacggacgtgttagtaatgcatcgtcacagtcgttgcggtatttggtgacgcctggtgcgaagacctatcaagaaaagaagtttactggtaaaaaagcgcagcatagtcaattacacgaaaatcatgcagtcaatcaaactgtcttagcgtttttatggtaaaacatacttaaaaagtggtggcgacaaaaattaattttgtcgccaccacttttttaatgttcaagacggtagtctcgcgctgcttgttcgagattcgaaatgagagcttgttgttttggtgagaagaactgggtcttacgataggctaacgagatgtaaaagattggttgtggttcatccaataaatcaagtaccactaagtcatcagcaggcgtaatactggtttcagttagaaaaccgatgccgacattttcgtgaaccatactttttaagacactaacgtcattggtgcggtaaataatttcgggtttgatttgattgacgtccgataagttcttgaagaccacgggatgcacgaatccttccgcgagcataataaatttctcgtgggctaaatcacgaaaggtgaccgctggtttctgggctaagggactatcaggtgcaactacaatcttaaaatggtgacgttcgatgactttagctgtgatggtatcggtttgaagtggcgtcgcagagccaagaagcgcgacatctagttcaccggcttctaatgaagccaacaattctttggaacccccatcagctgtcttaaaatgttgaatcgtgccgttagcggctagcttttgtgctaattttgagaagtagtaagtgccgataattggtggcaagccaaaacgcaaatcagtagcgttgagattgagcatgtcggcctttgttagttcaatctccgctaatattcgcgcggcatgttgataaagttgctcaccactaggggtaataatcaatgattggtgtgattgatcgcgctgaatgagtttggtcgcgaattcatcttcaaggcgtttgaccgcgtaagtgatcgtcggttgactgaccttgaattgatcagcgactgccgtaaaattttttaatttaattagcgcagcaaaataggccaaatctttaatcttcataaaaactcctgtttaatgcagtttagacgtttcatataaatctattttatcataaatgtaagttttgactatcaaatgttgaggcgtgtatagtgaccaacatgatataaaagaaaaggagatttttaatatgaaagcacaacaaattttaaatgatccatttttaaataagggtacagcattcactgctgaagaacgtgcacaatttggtttaacggggatgttaccacctcacgtgcaaaccattgatgaacaagttaaacaagcttatgcccaatatcaatcaaaagccaacatgcttgaacaacggattttcttaatgtcaatttttaatgaaaaccgtgtgttgttctttaaattattcagccaacatgttgctgaattcatgccagtggtttacgatccaacgatcgctgacacaatcgaaaactacagtgctttatatgtgaacccccaaaacgctgctttcttatcaatcgacgatcctgattcaatgaagacaaccttggcaaacgctgctgatggtcgcgaaattaaattaatcgttgtgactgatggcgaaggaatcttagggattggcgactggggcacacaaggtgtggatatctcagttggtaaattaatggtttatacggctgctgccgggattgatcctagtcaagtcttaccagttgttttagatgctgggacgaaccgtgaaagcttactcaatgatgagttatacttaggcaaccgtcatgaacgggttcgcggcgatcgttactacgatttcgtcgatcaattcgtgcaaacagctgaagacctattccctaatatgtatcttcactttgaagattttggccggagcaatgctgctaatattttgaacaagtacaaagatcaaatcgtgacgttcaatgatgatatccaaggcacagggattatcacattagctgggattatgggcgctttaaatatctctggtggcaagatgaccgaccaagtttacatgagctttggtgctgggactgcgggtgctgggattacccatcgcatcttcgaagaaatgttacaagaaggtttaactgaagaacaagcacgtagccgtttctacatggttgacaagcaagggctattgtttgatgatgatccagaattaacaccagaacaaaaaccatttgcgcgcaaacggagtgaattcgcgaatgctgatgaattaacaactttagaagctgctgtcaaagcaatccacccaactattttagtggggacttcaacccaacctgggacctttacagaatcaatcgtgaaggaaatggctgctcacacagaacgcccaattattttcccattgtcaaacccaacgaaattagctgaagcaactgctgcagacttaatcaagtggactgacggcaaagctttagtagcgactgggattcctgctgcacctgttgaatacaacggtgtcacatatgaaatcggtcaagcaaacaacgctttagtctatccagggcttggtttaggcacaatcgcgtcaactgcgaaagtcttaaatgacgaaatgattagcaaagcagctcactcattgggtggcatcgttgatccaacagaacctggcgcagctgtcttaccgcctgtgacaaaactagatatcttctcacaaacggttgcgaacgctgttgctcaaagcgctgttgatcaaggtttgaataaagaaccaattgctgacgtgcaaaaagccgtcgcagacatgaaatgggaaccagaatacaaagcactataatttaaatataaatcggtaggagcgtgaaagagttggcagcatttctaacatcattatcaagcgttgtcgaaatcgtcttagtcattgcattggggttttggctacggagttcaaaaaaattcgatgataattttaaaggcacaatttcatttttaatcatgaatgtcgctttaccattatcaattttcgtctcagtattagataacttaacccgtgaaaagttggtcggtttatctggcggcttgatttacgtcttaattagtttcgccctcggttatctcgtggcatggttactaaccaaggctttccgaattcggccaggtcgtcgtgggacatttatcaatatgttcgttaatgccaataccatcttcattggtttaccattgaacttggcactattcggtgacaagagtttaccttacttcttgatctactatgtggccaatacggtttcaacatgggcaatcggggtcttcttcatctcaaatgatgatccaaccaaagaaaaaggcgctgctaaaggcaaatttaactggcgtaaattattaccttctccattaatcggtttcttagccgcattaatttatcttttaactggtttaccattaccagaattagttgataaaaccttctcaatggtcggtggcatcgtaacaccaatgtcattgatctacattgggattatcttagctgatgctggtttgaaatcaatccatttcgaccgcgatacagtccttgcgttattaggccgtttcgttgtggcaccagccatcatgattgccatcatgctattcttcaagaacacaacttcaattccatcaatcgaacaaagcacattgattattcaagctgcaacacctggtttggctgtcttaccaatcttagttggtcaatcacatggtgacgttaaatatgcaacgaacgttgtcacaacaagtaccgtcttattcgtggtcgttgtcccaatcttgatgcaaattgttcaatatatctaaagcttaaatgtgtcgttcagctgacactcccctaaatcttacccccagcgcgccgtctcaattaattgagacggcgctttttttgtgcaaagaaacacaaagaatgttgtcaaaggcggcaaagtgcattacaatgaaaacggatttaataatgtgaaggggacgatagcatgacagagaaaatctacactaacttagcacctgaaccattgggaccatacagccaagcgattgcaacggatcaactggtctttatgtcagggcaactcggattaaaagatggccaattggcaccggacttagcgagtcaaacaaaacaagcaatcacgaatatgcaacacgtgttagcggcagcaggattatccctagaaaacgttgtgaaaaccaattgttttttaactgatttggatgactttaacgaattcaatgaagtatatgcgcgattcttcggtgatatcgcaccggctagaagtgccgttcaagttggtaaactaccagctggcgcaattgttgagatagaagcagttgcaattcgttaatgccgtaattgactgaataaacaaccatttgaaaaaagcctccagaggaaattaaatgcatttcatttaatcatctctgggggcttttttgcatgcctgaaatttaatgtttaaagggatgttcatgggtacaaatactgatatataggcattgttgtgaaaatattctaccaatgttaattataaaaagattaaaattagatgatgaaaattgcggataaaatgaagctccagcgcgaccattttgatgacatggaaccgaatacaaatatcggcattaaagaagtttacacatgttgcataatcatagacagggattatctctttaaaagatttaacagattcgttttaaaacaacttgtacacaatttaatagcttgtcagaatgaaaaaacattaagtccaattggtgattaattgattgaatctttgatatcccaattgataactagaccgtaccaaaggtgtagtgatgaatggaaaaatagaaaaatcatatggaggtagacgatggatagaagaaaattagcgctgggtgcaacaatgctgaccatgttattgacgtttatctgtatcaatagtggtcgtactcaagcagcgatacccgcccatattccaatcgatggcatctttaaaccctccattggggtagatagttccgttcaagcaggtggaattgtgcaagtgacaccagatagccagaacaagaagggggcaatttggtcggaagagcagtataagattgatttgacacataattttacaagtttaatgtatgtcaatttaggggacaaaaaagcgcaatcggttgacgggatggcctttgcaatgatgaatgacccagacaaggttaagaattggcagcaagtgaccggtggcgcccttggtgtttggcggaatccattttcttgggtaaaagataactcagcaatcgccaagtcatttgccgttgaattcgatacgtaccataatggcaatgattttgacggtttgctacccaatgatggcccagatagaggccatgttgcttataattttccaggacaagatagtgcatatcagcgtttaccaagtcgcttgtacgcgctaaaccatctacaacttcaaaaaccgcaaaatggtgattatttatcattagtaacattaggccatatcgtgatggcaccaagtgtacaggctgcgacaacatcgaatgaaacaactacgaggaaaattgcactagaagcaggggacacaacaacgactaacccaccaattgtgccagggacagatggaaacggaaacggaccaactggcgcaacaggggatatcacgattgataatttaacaccacttgattttggtaaggtgaaactgactggtggcgcgcaaaacgttaagaatattgttaaagatcctaacgtacaagtcaccgataaacggggaactggcgctggctggaatattaccgttaaaagttcagaatttaaagacacaacggattcaacgcatatcttaaaaggcgcacagattaattttccagtcggtaaagtagtcgctagtgattcaacgaatactgctgcaccaacagccaaagcgattactgttcctgctgatgggttggataatgcgcaaatcttgatgagtgctgataaagataaagggatgggaacatgggcagatgtgatgacaactgacggcattacactggatatcgctggtggcgcttatgctggcagctataatgctgatttgacctggacacttggggatacaccgcttcaattagctggcagcagccgctaaatttgaaagaggcaagtgttaagtcgttactgcaacggactaaattttaatcgatgtgcaaagtgattaaagagagggacttcaaaaatgaaatggatgcatattttacaaagaatcagcgtcgtcatcttaatgggcggcatcgcgttgtggttgaatacaacgaccgtccaagcggctgatcagagtatgaattaccaagttaaagcgaatttacccagcagtcaaaacaatcaaagtgtaacgtattttgatttaaggctggcacctaatcaggaagagacgattagtatcacggtgcaaaataaggataaccaagcgcatatctttaacatcagtccgaatacggcggtgactaatcaaaacggggtcgttgattatagccagtcaaagaaaaaagcggatgaaacggcgcctgctaatattgcctcactgattacgggggataaaaaagtaacggtgccggctcacagtagcaaggacgccattttcaaaattaaaatgcctgctaagaagttccattgtactttattaggtggttttaatattgttcgtgaagggcagcctaccgttaaaaagcaaaagaatcgcgtgacattgcgtaaccaattcgcttatgtaatcggtctgaaagtgaccgaaagtgatgccattattgcgccaaatctgaaactgaatcacatcaaagcggggctcgttaactatcggacagcaattacggctaatttacagaatacaaaggctgttatgatcagaggcttgaaagttgatgcggtggttaccaagttaggctctgatcaagtgcttcaccggacagtcaaatcagacattgcgatggcaccgaattcgaactttgagtacgccatcaactgggataatgaagcgctgaagccgggcaaataaatgcttaagctaaccgccactgataagtcgggcggttagtggtattttacgagtcggtttaatattacagagcaaaaaccatcaagctaatgaccaagccgttgatttacaaaaaacaaccattaactggtggtatatcatgcggtggcatattcctggtgctcttagttgggtatattatttttctaaaacgacaagcgaaaaaagcctgattcaatgaagtcccaatcctgagcgcgtcatcgattagaatggattcgaaaataatcccttgataatgaatagatggaagtattatctctattcactaccaagggatttttatatgtgctgcgttattggttgttcggttaattaggtttaaaaaagagggaatggattttatatcacgttatttacgaatgatattcataaacagtggttttttgatgccatttcacgtataataaactaaaaacaaattagagatgaggcaagaatattgatttcgactgaaacgacactagctgggtaccactttgataactgtttcatgaacgcggcgggggtttattgttatgatgctgctgagttaaatcaagtgcaggcttcaatggcagggactttcgtgaccaagagtgccaccgttatgccccgctctggaaatccagaaccacgttatcaaccaacgcgtttaggcagtatcaattcaatgggcttgccgaatgaaggcctaccttattatttagactatgtgagtcaacagcaaaaggcagtgccagacaagacatactttcaatcgattacgggatttaatattgaagaagacgagcaactgttggcacagattagtgcttctgattttaaaggtgtggtggaattgaacttatcttgtccgaacgtaccggggaagccgcaaacgggctatgattttgaaatggtagaacgaattctaacgcgagtttttacggtttatcacggtccattaggcgttaaattaccgccgtactttgatatcgtgcattttgatcagatggcggcgattttgaatcaatttccattagcgtttgtcaattcggtgaatagcattggaaatggcttgaaaattgatgtggcaactgaacgggttgtgattaaacctaagcatggtttcggtggcatcggtggcgattatatcaaaccaaccgccttagcgaatgtccatgccttctatcagcgtttgaatccagccattcaaattattgggactggtgggattaaatctggtcaagatgcatttgaacatattttatgtggggctagcatggtccaagttgggacagcgcttcaaaaagaaggccccattatttttgaacgtttaacgcgcgaattacagacaagcatggctcaaaaaggttatactaaactgtctgactttagaggcaaattacaatatttagattagttgaaatgaggatttacaatgcagtatcgttatttattttttgacatggacaatactttattcgattttgatgcggatgaagatcaagctttggcccaattattcaaagatcaaggggttcaattgaccccaacaattaagacaacttatcagacctttaatcaaaacttgtggcggcagtatgaagaaggtacgttaacccgggaaatattattgaacacacgctttgcaaccttctttaaagaacagtttaatcaggaagttgatggaccaagattgtcccaaaattatttagacaacttggcattaggccatgatttaatgccacaagcagaagctctgttaaaggcgttaaaagcagctaacattaagctatatgtcacaaccaacggggttgccaacacgcaatatcggcggttacaagattcaggattaatcacatatttcgatgccgtttttgtttcggaagagttgggatatcaaaaaccagatccacggtatttccaaagtgtcttccaacaattagagggaatctcacaagcagaagctttgattgtcggtgattcacttacttcagatgtgcaaggtgggcagaacgtgggtgtcgccacagcgtggtataacccgaaccagctagcaaatcaaatgacagacatacagccaacacacgaaattgaacacttaatggacttattggcaatttaaaagccgatttgcggcattcaagaggagtggataaaacatgaaaaagcaacgatattttagaattagcctaggttggcgaatcttaattggaatcggcctagggttagtggttggtcggtttttctaccataatcaaaccgctatctcaatcttacaatcaattggaaccttgttcatcaatttaattaagatgattgtgttaccaattgttgtttcctctttggtcgttgggattgccaagatgggtgatatcaaaaaacttggccgaattggtggtaagacgttattgtatttcgaagtgatgacgaccttcgcaattattctcggattagctgtcggcaatattgctaaaccaggagcgctgattgacattcatagtttggcacatggctcaattagtcagtacacagcagccgctaagaccgctggaaatcatggcttgggtgatatcatcatggatatcgtgccaacgaatttctttgcggccttggggtctggtgaaatgattccagtcatcttctttacggtcatgttcggtttagggttggcgacctttggtaaaaaggcaaccccgctcatcgatgcttttgaaatgatttcagaggttatgttcaagatgacaaactggattatgcagttagcaccaatcggggtgtttgcattaatcggggttacaattgcccaattcggatttgaagctttgaaaccattgctctatttcatcatcgtttgttacgcaacgatggcatttttcgtggttgttgtggctgggttggtcgcgcggatttggcacatcaatatctttgaaatcttgaaagttttcaaagaagaattggtgctagccttttcaacggcgagttcagaagcagcgttacccaaagtaatggaaaaagtgcaaaattacggtgttagtcaagggattgcttcttttgtcattccaacgggttattcatttaacttggacggttcggcaatctaccaatcgctagcggcgctgtttttggcgcaagcctatcacattcatttaagtctcacccaacaaattacgctattggtggtcttgatgattacctctaaagggatggctggggtcccgggtgcttcattcgttgtcttattagcaacaatcaccacaatcggcgttccggctgctggtgtggccttcattgcggggattgatcggattgtagatatgggacgaactgccgttaacgtaatgggaaattcattagcagcagtcattattgccaagtcagagaatgaatttgatgaacaaaaacatcaacaatatatgagtggcaatgaacttaaataaagcaaagaccttaaatcaatcgatttaaggtcttttttgtataaaaaacgattttagcacaccgcaaacattagcggtatctaattataaaagcttaagtaatgcgacttttagcgcttttttgtcgattatctagaccaatttcgcagataatctaaaaatgattagacagattagaattttgtggtaaaattaattcagtaaagcgttttaaaaaataaaaacgtggaactgttaactcagtcaataatgtttaagccattatttttttatattaattgatagcgttttattgatgagtatgacaactatttttattaaggaggtttttgtgaatggttggaatcgttattgcaagtcacggggagtttgctaaaggaatcatgcaatctggctcaatgatttttggcgaacaagaaaaagtacaagctgttacttttatgccaaatgaaggaccagatgatttgaaagcgcatttagaagctgccgttgcaacgtttgatgcagatgatgacgtcttattcttagttgatctttggggaggttcaccatttaatcaagctaatgggttgttcgaagcacataaagataagtgggcaatcgttacaggattaaacttaccaatgttgattgaagcttacgcatctcgtttatctatgacatctgctcatgaaatcgcagcacatatcattgatgaagctaaagcaggggtacgggttaaacctgaagaactacaaccagaagaagcacctaaggcagaagccgcacaaacgacttcaaactcaggcacacctggtaagttcaaatatgtcttggcacgaattgattcacgtttattacatggtcaagttgcaacgacatggtcgaagacaactaacccaacacggattatcgttgtttcagataacgttgctaaagatgaattacggacaaacttaattaaacaagctgctcctagtggcatcaaagcacacgtcgtgccagttgatcaaatgattaaattggcaaaagatgaccaacactttggtaaggaacgtgctttgttattatttgaatcaccacaagatgcacttagagcagttgaaggtggcgttccattagaaacaattaacgttggttcaatggcgcactcaactggtaaagtgcaaccaaatactgttttggcttttgaccaagatgatattgatacctttgaaaaactaaaagctaagggcatcaagttcgatgttcgtaaagtgccaagtgactcaaacggtaacatggatagtatccttaaaaaagcacaagcagaactagacaaacaaaataacaaataacatcagaagaaattggaggattaataatcatggatttgaatttcattcaagtgattttggtcatttttatcgcatttctagctggtatggaaggtatcttagatcaattccatttccatcagccagttattgcttgtacactaatcggtcttgtaaccggtcaattactaccttgtcttatcttaggtgggacattacaaatgatcgccttaggttgggctaacattggtgccgctgttgcacccgatgctgctttggcatcaatcgcatctgcaattattttaatacttggtggccaaggaaaagccggcgttacatcagctatcgctatcgctgttcctcttgccgtagccgggttattattaacaatcatcgtacggacattagcaactggtatcgtgcacatcatggatgctgctgctaaagaaggtaacttccgtaagatcgaaatgtggcaatatatcgctattatcatgcaaggtttacgaatcgctattcctgcaggcttaatcttagcaatcggtgctggccctgttaaagaaatgttgacagcaatgccaatctggttaacagacggtttagcaatcggtggtgggatggtcgttgccgttggttacgcaatggttatcaacatgatggcaactaaagaagtatggccattcttcgcaattggtttcgtacttgctactatctcacaattgacacttatcggccttggtgcaatcggtgtttcacttgccctattatacttagccctttcaaaacaaggcggctcaggtaatggcggcggttcaaatactggtgacccacttggcgatattatcgacaactactaagaaggaggctaacaattatggcagaacaattaaaattaacgcgtaaagatcgtatttctgtttggctacgttcaactttccttcaaggttcttggaactacgaacgtatgcaaaatggtggttgggcttactcattaatcccagcaattaagaaattatacaaaacaaaagaagaccgggcagctgctttagttcgtcacatggaattctttaatactcatccttatgttgcttcaccaatcatcggggtaactttggcacttgaagaagaacgtgctaatggtgcaccaattgatgatgttacaattcaaggggttaaagttgggatgatgggacctttggctggtatcggcgatcccgtattctggttcactgttaaaccaatcatcggtgctttggctgcttcacttgctatgagtggtaacattcttggcccaatcatttactttatcgcttggaatgctatccggatgtcattcatgtggtatacacaagaattcggctaccgtgctggttcaaagattacagaagatttatctggtggtattttgcaagacatcacaaagggtgcttcaatccttgggatgttcatcttagggtcgttggttaaccgttgggtatctgtcaagtttacgccagttgtttcatctgttaagttggacaaaggcgcattcatcgactgggataaattacctagcggtgctaagggtatccaatcagccttacaacaacaagctcaaggtttgtcattgacaagccataaagtgacaacgttgcaagacaacttggacagcttgattcctgggttagctgcattaggattaacattattctgtatgtggttacttaagaagaaagtctcaccaatcgtgattattcttggcttattcgtagtcggaattgtcttccatctattacacttaatgtaaaagagtgcgcaataagctgggtatcttctgaggattagcctaatcaggcgaattaccaacaaagtcggtgatttggcaaatttggttaaccgcaggaatatgcctactgaagcacgtttagaaaacaaaggaggggctaggacaaagtcaatttgtcctagcccctcctttttataaaagcgtataatgaaagtaagtttttggaaatggagtcgatattatggttcaatcgattaatacaaaggtggacttagtgattaaagccacgtcgtttacagcactctctgattatggacaaatcatgatcggggatagagggtttgaatttttcaatgatcgtgacgcacgacaatttattcaaattccatgggaagaagttgactatgtgattgcatcagtcatgttcaaaggcaagtggattccccgctatgctatccaaacaaagaaaaatgggacgtatacttttgcttcaaaggaacccaaaaaagtgctccgcgccattcgcgagtatgtgcccgcagaacgcttagttcaatcactaggggtctgggatgtgattaagcgtgtgtttaaacgcaaatcaaattaacttcaggaaggtgtgaccaatattggtcacaccttttttgaatcgaattgcctgtgattttaattggtaccgatttgagtggcgtgctagaatatcatataaggttgattgttcaacattttaaaaaattaagttaaatgaggtaatgatcatgggatttgatgaagcgattaatgcaattaaggctggcaaaaaagtagtacggactggctgggatggtccagaattatttattttccaagtggccgatgggacattcgaggggcaagcaattagtccctacctattaattaaaacaaccgaaacaccagcatactcaatgttccaaccaacatcgtgtgatgtattggctgatgattggcaattggtcgactaatggggcattttgcagatttagcgactaaaaccattttaattaccggggcggcatcgggaattgggcgcgctcaagtggccgcttttttagcagagggggcattggtgttagcacttgatcgccagccgattgaagtccctgttgatagtcggtgcatcacagcgcaggttgatgtttgtgatgaaacgcaattaacaatgacattagcgactttgctggcagaacatggcccaatcgatgtggtctgcaacacggcaggcgtgttggatgcttatgcaccaacgcttgataccagtagtgcggattgggatcgaattatggcaacgaatttaaaaagtcaatatcttgtaacaaatgcgatcttgccaacaatggttgcgcaaaagcgtggggtattcgttaatatggcttcgattgctgggctagttgctggtggcggtggtgcggcttatacggcatcgaaacacgccatcattggctatacaaagcagcttgattatgattacgccgctaaagggattcgcgccaactgtatcgccccaggtgcgattgagacgccgatgaacgcagccgattttgcggggactggtgagatggcacaagaagttgcccgtcagacaccagcggggcgttgggcgcaaccaactgaagttgcgaacttaagtgtttacttggcgagtgaggttgcggattacattcatggtaccgtcgttccaattgatggtggctggattgaaaaataacgctgactaaggagattatgatggcaaaacaaattaaattaagtcaaaccgtttatgaattggtaacggcctatcctgaagtggtgccagtgcttgttgaaatcggacttgatggggtcacgaacccagcgcttttgaatactgcggggcgttttatgacattgcctaaaggggctaagatgaagcaaattcctttgacgacgattatcgctagtctagaagcacaaggattcgaggtgttagctgatgtgtgagcaacagcatagcagtgcgtaccgccaaaaacgaatcgtggaaatcttaaaaatgctgcatgaaggtggctcgtttgaagaggctaagcggatttttgatgagtccttctctggggttgatgtgtctgaaattacgtctgctgaacgggaattgattgccagtggcttgaacccgatggagattcaacatttgtgtaatgtccatgctgcggttttcaagggggcgattaattcaaacggggctgaaacgccggaacaagaacagccaggacacccagtcgctgtgatgaaattagaaaatttggtcatgaactcgctcttaaatgatgaattactgccatgtttgaagaaatggcagcagtcagggactgatcaaaattatctcgtgcggatgcaacaagcgttaaaagatttacagttgatcgaccgccactatttacggaaagaaaacttaatttttccgttgatggatcaatatggaattactgcaccacccaaagtgatgtggggtgtggatgatcaaattcgggggttggtgaagacggcctatcaaatggtaactgcggaaccaattccggataaatatgcaattgaagcagccgttgaaaagatgagcaaagaaattcaagaaatgattttcaaagaagaagaaatcatgattccgatggttaatgaagtctttacaccagctgactggggactaattgcttctgaaagccaaccaatcgggtataccttaattccagacccattaccatggcaaccaagtgctgaagctatcgcggcggccgaaaagcggaccgtgccgaagattgcgcaagaactgaatgcgatggcgcaatcgttggcggatgcgcaaatgatgacccaaacaacgccaccagaaccgggcccctcttcgatagcagcagcgactaatattccgtttgaaattcaggggcaacctgtaccaaaagcccccgctgaaaaagatgaaggaaaaccagaaatgcctgattttgtgaaggcaatgttagctgacgaaaaagaagcggcaccaaaagcggaggttcaagcacgtcgagaagcaccacaaccccatatcgaaattggcgtggataaccaagctaaaatcgttctaccatctgggtcgatgaatattagtgaattgacggcgattctccaagtactaccgcttgatttaacctttgtcgatcaaaacgatattgtgcagtggttctcagataacgagcatcgtattttcccaagaacccgggcagtgattggccgcgcggttgtgaactgccatccaccaaagagtgtggataaggttgagaaaattttagcggactttcatgcggggcgagaagaccatgctgatttttggttgaacttccgcgggatgttcgtctatattcgctattttgcggttcgtgatccacagggacaatacttaggctgtttagaagtcagtcaggatttaacggaactccgtgcactaacaggcgaaaaacggttataaaaatgcattaagaggagaaaagagatgcaacaaattattttattacttgccgtcggtgttttagccggcgtgttgggttcaatcttagggattggtggcgggatcattgtaacccccgtattaacgctagcgattggcttagatattaaatacgcgattggggccagcattattgccgtgattgcaacaagttctggtgcaactatcgcctatttgaaagatgatatgctcaacttacgagtggcgatgttcctagaaatagcaacgaccgtcggggcgattatcggggcgttattgaccggcatcgtaccaactggattcttattcatcttattcggcgcattcttgctattttcaacgtacaacatgattcaaaaattacgtggtaaagttgcagaacaacacgtcggcgctggtgaagataagtgggccaagaagttgaacttaaatggcacttactacgataaggccaaccaagaacaagtcgactacgctgttgaacaagtaccaggcggctttgccatgatgttcggggccggcattgcttctggcttgctcggtatcgggagtggggtattcaaagtgaccgccatggatacgattatgaagatgccattgaaaccatcaagtgccacgagtaatttgatgatgggggttacggcagcagcttcggccactgtttatttcttcagcggtgcgattattcccagcgttgctgcaccgttagcaatcggaattttggtaggttccactgtgggttcacggattatgcagtatttgcaaccacgtgtgattcgcatgatttttatccccattttgttatacacaggtttacaaatggtgcttaaaggattcggggtgcatatttaatgatagataaaaaagcagagatggctcaaattgaactcgtcatcggtaaaattttacgcattggggtggcggtttcagcaacgctgctcattattggcatgttacttgcgattattcatggcggtacaggttattcagaatatcaatttccaacgacctttaccgaaattttcagtggcattgctgcatttaaggctggcgctgtgattatgttgggcttattctgcctcattttaacgccagtcttgcgtgtggtggtatcaatctacgcatttgctaaagaagtggattacctctacgtttggattacggttattgtgttggtcatcttaatcatcgggatggcaattggttttataaagaaataaagagtggtttattagctcagtatctcgcgaggattaaaaaaagggccaacgacaaacatgtttgtcgttggcccttttttttgtggtgaattaggctaatcctcagcgtataatcgtctgccgtcgcactctactttgaaacgtgctccgtaagccatcttcttccggttagcgacatcagtcaaatcaccgactttgtcggcaatccgcctgattaagctaatcctcagaagataaacgggcttactgcgcactctattccattcctagtattcttttctttttttcttcgaattcttcgtgggtcattaggccgtcgtcgcgcattttgaggtaagccatgataagatcaccggtcttaacataactgaggtcttcttcaacggttggtttttcgagatagtccgctaaggctgtgtataacttgcgcacagcgaggttatcgtcgggttcgaaactgatgacgattttttcgagggcgtggttgggtttttggtagagaatttggagatgaccatgccgataagtcgcttcaaaaaagcggactgattttaatttgctaaacggaatgtcacgatcctggttttgtttcttcttaaacagtccgggatagtgaattgttaggatattttcgtcataggttaattcgagtttttgaggttttttaatgagataagtttgcatcgtttgctcctttaatcattcttaagtaaaagcacggtagttcttaataaatgaagcctaaacttacctttatcatagtagacagtgaccctaaatagcaagctgttcgtattggtttatgaaatgaggtgggatgatgaaattttttatgggtattcgcaacggcctgttagtggcattaccgatttggtgtttaataatcttctcaattacgtattggttacgctaaaataaaaaaacgggcgccgcacaaaaactgtgcagtgcccgttttttaacgtaaattggctgttttttaggtctaaagacggtttttatgctagtatgaatagattacaattagtgacattgattgcatctaggcgatgtaattattataatgaaatcaaatgtccaaagataaggaggaggaaaccaattgaatattgggatatttacggacacctactttccacaagtcagtggtgtggcaacctccattaaaacattaaaagaagccctagaaaaacaagggcattcggtctacatatttacaacgaccgatccacatgttgacaaagatgcagtcgaaccgaatattttccggtttgctagtgtcccgtttgtctcatttacggatcggcgaattgctgtgcgcggcttatttcacgcttatcaagtggctaaggaattggatctcgatatcgtgcatacccagaccgaattttcgatgggctacatcgggaagtttgtcgctaaaaatttaaaaattccttgtttacatacgtatcatacgatgtacgaggattatttacactatgttttaaacgggaagttattacggccataccatgttaagcaaatgacaaaggcctttttatatcacatgtcaggcatcgtggcaccatcagagcgggtttctcaaaccttaaatggctatcaagtgaaggcccccatccggattattccgaccggggtcgatattagtcgctttgagcgcgaagtgacccgcgacatacgggccgaattgggcttgacgccagaacaacctgtgctcttatcattgagtcgcgttgcttatgaaaaacggattgatatcttagttgatgcgttacccaaactagtcgcccaaacaccagatttaatgttagtgattgttggtgaaggtccagctcgagaagatttagaagctcaggttgccaagttaaacatgaccgaccacgtgattttcactggaatggttgataacgatgaagttgcaaattattatcatatggcgaatctttttgtctccgccagtgactctgaatcacaaggattaacttatattgaagcgatggccgctgaactcaagattgtcgtcatgacaagtccatatgcggctgagttattaactgatccttcaattgggacgacatttacgaacgaagatgaaatgatccatcaagtatcgaattatttgaatcatccacatgcatttgatgatccagcaccgcgccgaaagaagttgcatgctatttcggcggattactttgcggaacagatgattcatttctataagcaatcacagctattatatgacgaattaaagttagaccaagatgatttattggaattagaagatttagatactaaaaaataagtcgcgctggcggaaaactgttgatcatataatcaacagttttttcatatcgttgctaataacaagaaaaagggtcgtttatgagtagaacgaataagattgtttttgcagtcatgctgttgattgggtgtgggatttttgcctatgaaagtcgcacgctggcgttgaaacagctgtttatcgatattagtcatctgaaactttggtggctgttggtcgccttattatgtatgttaatttcgtggtttttcgaggcacttgtcttacgcgtctttctaaaagaccgcacagaacacttttctttatacaatgcgcttcggattccgttgattgcacaactattcaatgcgattacaccgttttcttcaggtggacaaccggcacaactggtagcgttgatgcaatcccgtgtagaagctgggcaagctagctcagtactgctgatgaagtttattgtttaccaattcatggtactggtgaatttcttattaagtatgatgatcggtttctcgcaagtttccaagcattttgggacgctgtcgattttgattactttcggattaatcgtgcatgtggttgtgttagccgtattgttgctaatcatgtattacaatcgatttacgaaacagttagtgcactggttattaattccggtgggctggttcgtctcccaaaaacgggtgacggaatggcggaccatgttaatggccaaaatcgataccttttacgcggagagtctacaccttaaacgcgagaaaaagaaactaatcaagggctgtattttaacccttgggcaactttttttctattatagtgtgccatactttgtcttattggcacttggcatcccgcatgttaattatttagaggtgatggtcttacacatcatgattgtcatgattgtctcgctctttccagttccaggcggttctggtggggcagaatatagttttaagacgttatttgccacttttatcccgagttcaagtaaactggtgttaggcatgttgctctggcgattgtttacgtactatctcgggatgttcatggggattggggcgttagcagttaaaccacgagtaactgataaaaagtaggaggcgtttttgatgcaaccaacaattggcttcattggaacaggtgtcatgggtagtagcatggtcaagaatttattgaaggcagactatccagttgtcgtgtataaccggacaaaacaaaaagcggatgcagttgtggcactcggtgcaacatgggctgattcaccagcagcggttgtcgcgcaaagtcagattgtgttatcaatcgtcggttatccgcaagatgtcgaagccatctattatggtgaagacggaatttttagtgctgcacaacctggtcagattttggtggatatgacgaccagcacgccaacattggcgcagagaattgccaaaacagcagctgacaaaggtctgcaagcattagatgcgcctgtttctggtggcgatatcggcgcccaaaacgggacgttgacgattatggtcggtggcgatcaagctgcctatgaaacggcattacccttttttgaagcaatgggtaagactgtccatcgcttcggtgctgccgggacaggccaacatacaaagatggccaatcaaatcatgattgctggcacaatgaccggaatgacagagatgttagtgtatgctaaagcagccggattagaactagaagcggttttaaacacggttaatggtgggagtgctcagaactggagccttgcaaactatggtccacgtattctagcgcaagactatacaccaggctttttcgcaaaacattttttgaaggatttaaagattgcattaacggaatccgaaaagatggggctccatttaccagctacgcttcaagctaagaaactctatgcgcagctcgttaatgataaacaattaggcgacgatggcacccaagctttaattaaattatggtggccttctgcaaaataattggatataaacggtgcagaagtgctctttttctgataaactgatagttagttattaaaggaggcttcgccatgcaatcatcacagttagttgcgattatcaaacgtctggtagcaatgcaagaagatcaaagcgctgaggttcaagaaagacgttttgaaaaggacggcgatttaaaagcaactgttagctatgatcctcaagctcaagcatttgaacttgaagacagcaacacacatcaacaattccaatttgacaatattgatttagttgcaatggaactatacgatttattagcagactagttaattaaccattgagtatcgaattacttgatggtttttttgctacttaagcaggtgatagccttgctcagttgcgactcagattattaaaaatggtttaatatttggcattcaagccggttacatattgcttttcatttcacggatgtgtaaactaactttcagattgtcaacggcttttaaagcccaacgacctttaacggaggctactgtatcgatgaaacaaattggtcataaaattcaatcaggattaagcacacgatggggattcttccttttcgcagttgcgctattctggcttaaaacaatttacgcatatcaaacaaaatttaacttaggcgtcaaaggtggcatgcaggccttcttaatgacgattaatcccattccaacaaccttattgctatttgggattgccttgtttatgaatggccgaaagtcatacattacgttgattattattgatttaataacctcaacttggttattctcgaatattttgtattaccgtgaattttcagacttcttaacgtttaacttaatgaagggttctggtgcggtatcaaataacttgggcaagagtattgctgggattattgaatattctgatttcctagttttcgctgatgttttattgctaatcatcttattggctactaagttagtgaagattgatcaccgtgtctttatgaagcggaatgcatttgcaattactgggttagctgttgtgttattcggtgccaacctcgggattgcagaagcagatcgttctgggttattaacccggacgttcgataacaactacatcattaagtatcttgggatgaatgcatacactgtctatgatggcgtgaagacgaccaagaataatgcgattaaggctaatgctgatagtagtagtatgagtagtgtcttgaagtatatgaaggacaaccgggttgcacccaatgttgaatacactggcgtggctaagggtaagaacgtctttgttatccatttagagagtttccaacaatttttaattgattataagtgggacggtcaagaagtcacaccaaatatcaataagctatatcacgaccaaaacaccctcagtttcgacaatttctttaaccaagttggtcaaggtaagacggctgatgctgaattaatgctcgaaaactcattgttcgggttacctgaaggggccgccatggtcactcaagggacaaccaataccttccaagcagcaccatcaattctagatcaacaaggttacacaaccgcttcattccatggggatgtgccaagtttctggaatcgggataatacctacaagtcatggggctatgattacttcttcagttctcaatactttaaagaaggtaaaggctacaacgtgggttatggcttgaaagataagatcttcatgcaagactcagcccaatacattgaacaattaccacaaccgttctatgctaaattaatcaccgtgacaaatcactatccatacttattggataaacaaaatcaatcaattgctaagaccgatactggtgatgatacagttgatggttatgtgcaaaccgctaagtatttggatcaatcaattggtgaattcttagcttggttacaaaagactggcttagataagaatagtatgctcgttctatatggcgatcattatgggatttcagggaaccataagaaggctgttgcgaagttattgaatcaggataaatttactgattttgataatgcgcaattccaaaaagtaccgttcatggtgcatatggatgggttaaaaggtggcgttaaccatacctatggtggtgaaattgacgttttaccaaccttattgaacctattaggtgtaaaaaatgacgataccatccaatttggttcggatttacttgcgcctaaccgcaatcagacggttgtctttagaaatggggactttgtcacaccacagtatacgaaggtaggcagcacctattacgatacgactaatgggaagacgctgacgaatttaacggcagcgcagaagaagcaattaacggcaatcagtgaacatgtaacggaagaattgtcactttctgacaaggtaatcaccggcgatctacttcgattctatacaccacaaggattcgaaaaaccagataagtctaagattagctacaaggtgaaagatgctaaagctaagttgaaagacagtaacaacaaaacgagtgttatccagcaaaataatggtaagtcaacaatggacctttatgagacggatgcacctgaattgaagtaaagtatgtaaagacgttacgggactcgcgtaacgtctttttttgagcaaagatacttgtcagtctcgtcaaaaaaaggtacgattacagcaataaggatatatgataatgattatcattagcgaaaggtggtggcaaaatgagtcacatcgtgcaacaaacgttacggaaactcaaagaacacaacgtacggatcacgccacagcggcaagctgttttggaattcatgattggcactcatatgcatccgactgcagacgatgtctataaggcgctagcagggcgctttccgaatatgagtgttgcgacaatctataataacttgcgtctgtttacctcattagggattattgaagaaatggcttatggagatgcatccagtcattttgattttgcgcagaccaagcattatcacgctatttgtgagaactgtggaaaagtagttgatgttttttatccggagttagatgatgtagaagtgattgctgagaatctaacggggtttatggtaactgggcaccgaatggaagtgcatggtatctgtccagaatgccaagcaaagcttgcaaataactaagttgtttgaatatttagaaaaaagatgaattttatgcaaattttacttgacgatagatttagatgttggtatagtattctatgttgtcagcgagagaaaagctcatcgctaacgaaataacgggtcaaacgagattgaataaatattcagaaaatatttataaaaatttatttgtaacgcttacattttaagcggtatacttaagtaagtgaaacataaaatcatcaggaggtctttattaatggtagcacagaaaataaacgcatcagatgcaatgttaaaagtcatggcagactggggaattgaccatatttttggtttacccggtggctcgtttgattcaacgatgaatgcactacataaccagaaagcgattatgcgttacattcaagtgcgccatgaagaagtcggtgcactagcagcggcgggtgaagccaaagcaactggcaagattgctgctacatttggctcagccggacctggtgcagtccacttgttaaatggtctctacgatgctaaatatgataatgttcctgtattagcattagttggacaagttgctacgggtgtgatgaatacggattatttccaagaaatgaatgaaaaccccatgtttgctgatgtggcagtctataatcggacggtaatgacggctgaacagatgccacttgtagtcgaccaagccattcaacaagcctataaacaccgcggcgtagcagttgtcacgattccaactaacctaggctgggaaccgattggagataacttcgaggccactgcaaacttattccaaatgggcaattatccagagccaagaagcgcggatattgatcgtacattacagttaattaaagatgcaaaacaacccattatttattttggtcaaggtgcacgtgctgcgggtgaagaattggttgctttatctgatcggttgagtatcccaatgatgtcatcagccctttcaaaagggattgttgccgatgaccatccagcttatatggtttcagctgggcgagtagccacgaaacccggagttgatttggcagaagctgctgatctaatcttatttgtcggtagcaattatgaattcggtcaatacttcttcaagccagatgccaaatttattcaaattgatatcgatcctactaaactaggacacagacaccatgtggatgtcggaattttagcggatgctaagacggcattaaaggcattgctagccgcgagtgaaccagttgccaaaaaatctgccttttataaagcagcactcgccaataaagaaaactggaatgaatggaaagccagttttgaagaagacgatcaaacaccgttacgtgtggaacccgtcttcaaacaaatcaatgagatggccactgacgatgccatctttaatctcgatgttgggaatgtttcaatcgatggggtgcgtttcttgaaaatgcatccaggccaacgtatgacgttatcagcatggtatgccacaatgggttgcgcagtgcctgcagcaatcgggacccaggctgcctaccctgaccgtcaaatctggtcgattagtggtgacggtggcttcacgatggtgatgcaagatattatcacgcaagttaaataccaaatgccaatcatcaacgttgtattaagcaacgattcattcggattcattgaagctgaacaagatgataagggtcaaccacactcaggggttgccattcaaggggcagattacggtgcagcagcaacagcgatgggcgcaaaaggatttacggtacggacattagctggattgaaagctgcttttgctgctgctaaaggcacgaaggaacctgttgtgattgatgttaaaattgctaacgaacgtccgttacccgttgaacaactcgtgattgatgatcaaacacaggatccagcagaagtagcggcctttgttgaaaaatatcatgcacaaggattgaaaccatttcggacgttcttagaaagttaagcttttttaaatcagactagcgaccgataaaaaataatgttgaatgtggtaaattataattaaaattaaccttggaaggaattcagcggatgagtagaacaatttcaagacgcttaatcagcgcaacgtctctcatggcattaatcggaagcatctcattggctatttattggtctcggcttggtctttttaataacacgaccgcgttgcaggcgtatttggggcactctgtgctaattggtccgctgattttcatcacgattcagattattcaagttgtgattcctgtcattccaggcgggattagcaccgcagccggggttttggtattcggcccactttgggggtttgtttataattacgtcgggattgcaattggttctatcttgaacttcttattagcacgacaatttgggaagccgttcatcttacacgtcatcagtgaaaaaacgtatgacaagtatatcgggacaattatggaaaagaaaaactttgtgcgcttcttcgcacttgcgattttcttaccggtcgcaccagacgatgtcttgtgcttgatggctgggctcaccgagatgtcattgaagaaatttacatggatcattattttatgcaagccagcttcaattgcagtgtatagttttgcgctggtgtatggcggtcaattcctaatgcaattaatgtaaaaaaaggcccaggatattttatcctgggccttttttgcgtgtttaggcggtttttctctttaacccgatgccagtaacggcactgagaattgagaagattggtgataagagactgaagaaacaaaatggaaggtaactcaaggtagggacgcctaaagtattagcggcaaaaacgccagcgacgccccatggaacgaggtagttgataactgtcccaccatcttcaagggcgcgccctaaagcaagattactcaagtttgatttttcaaaggtgctcttgaaggctttaccagggagaatcacagaaaggaattcttcaccgataaagaggttaacgccaatcccagaagcaataacggcgctgagcaattgacctggcgtcttaagatgggtagcaagaggggccatcacgcgttcgattaaaccaagcttcattaagaggccaccgagggttaaggtcaagataattaaggcgacggtgcttaacatgctattaatcccaccgcgtgagagcaaggcatcgatacttttatcgccggtgtgggcaacaaacccattttcaatgtaactcgcaattttagcaattggtgtgtgtgggttgtggaaaaagattaaaccgattgaaacggcaatgtttaaaaagagtgttggaattgctggcattttaaggcgagcacaaacgaaaattaagatgattggaattagtgcaagtaggctaactgaagtgtgcgtgtttaagacagcaaccgtcgcaccaattttatcgagggagacatttttcgaggtgtggccaatgatagcgtataaaattaatgagccaacaaacgctggaaccgtggtccacatcaagttcttaatatgttcaaatagatctgtttcagtaaccgctgcggttaagtttgttgattgtgaaagtggcgatgacttatcaccgaatattgccccggaaataatagctgcggccacgatggtagtgtttagtccgagtgtggctccaatcccgaagaaagcaatgccgacggttgaaatgacggtaaaggcgctcccgatggcactgccgacaagcgcacagacgacgaaaatcgagggaatgaaccagtggacactgaccattttgaagccccagaccatcaggctaggaatcacaccggcggcaatccagatactgattaaggcgccgacgagaatgaaaataatgataggaatgattccgcttttgagaccatcttcgataccagaatgaatggcgtcccagctaaagtgccgccaacgggcccatagaatcaagagggcaatcgccgttaagacgggtgtttgtggtgaaagttggaaaacaatcacgccgctacccatgatggctagcagaataagtaaaacgatacttgcttctaataaactagttttgtgttttgtcatttaaatcgcatccttttaagtttaatggttaggctggtgcgacaaaagactgataacggaggattcccccgcacgatgcaatcttgaacatgaaaatccctccatagttgaaatgtgtttttgattggcaatgttctatgcaaatgtttagatattaagcgctaaatcacgcactctacaaaaaaagtccctactcgctgatgcgaatagggacgattggaaaccgcggtaccacccagttaacgtgtcattttaaggtaacacaccactcttacaggtgataacggtcctgttaattagccgaatcatccattcagtatttcgtaacaattaccctgatcggttcgcagcaaccaccgactttctgacacccagataatgcactacttagtttgaattaagatgacttatgattgttattcaatttacggtagttcgaattaaaagtcaagcatgaactttagaaaaaatttgtatcttgtaaattgtaactgtaatctaactggtaagaatcgcttggtaatgggacagtttcagcaaaacgctgctcgaattcgtcgaggggcaagcttgtccacagacgaaaactgtgatcatcataagcggcccagtcacaaattttagttaattcgggataccgttgtaaatcaggaacaggtgtctcaataaagtgtaaaaaataatcataggattcggcttgttgagaaacggtcgaaaataaatggaaataatcgcggaatgtcatcggtatgctcgctttctacaagagtaattaatcgttattagtataaactgaaaaagtggtataccacaactttggcgcttttgtttaatggaaacataagaatttacttggcgcaacactgtaagtgggttactatgagtgttgatatgacaaaggagttgttccagatgcagattaggactgccacaactgaactacggcattttcaactaatggatcttgaagtggtctatcaaattggttgtcaaaaaaagattgtgacgcagctaaatatgacggcttttcaatctcaacaagaagcacagtcgtttctaacaatgttgatgaatgatgaggatgcttgggcgattgttgatcgcacaacgcaggtggtgcaaggattgataatgctcgcccctacccttagtgcggatggacaatcagtcgcggcatatgaactcagttttgccatcttaccggcatatcaacgatgtgggattatcagcgcagtattgccggcaacgatgcaagcctatgcgcaagaaactggtgtaaacacctttaatgcggcctgctttttaaccaaccaagcatcgcaagcgagtttacagaaagttcagttcgagaagacttatcaatcacaactaccggattatttaggcgggcaacgagttcagtactaccgccgaatagtgaacgttttcaaattgtaaaaataacatggttataaccgtaataaatcacggtttaaatgagaaagctatggtataatcggtttgaaagacaaatgggggggtaatcaaatggcaaacgaaaacgaccaagcctatgcacgaaagttagcgcaaattgaggcaaacgaaaatttgacgattctatcaagtatgaatcaggttaatgatgaaaaggttaagcagtacatcgtctatacagactatcgcgaaaatggtcaacaagaatcgacaagttcgatttttgtctacacaccatacgctaatgtcgaccgctttggacattcaacggttgattttcaagcacaactcttatttgaaaccaataaatggaaaaaagaaatgcacattacagttcttgaaacattaggagcagcttcacgcttagctgtttatgatttccaaaatcttggtttagcacaattggcagtgaaagccttctgtaatttagcgaataagttggaaattgaaacaattgatggtaatatcagtacgttcgatagagatgattttaagaaagttgcacacattcttgaaaaatatgggtttgaggtacaaaccgacgcaggtcaatcctctggttcattcactaagacgcgaaaggcgtagtgcgcgactgttaaaaaggggatagggctaatgcatttaacacgggcgtttgaacaagcaacttgtattatcgtacttttggcgacgcaagatcctgaacacacaatttcgtctgaagtcattcatcatcgcttaggcgggtcacagacttacctacgcaaaattattcgtaagttagtagtggctgggctagtgaaatcggcttctggtaatagtggtggttttacactagcgcggccagccgatgaagtttcaatctacgatgttgtgttggccacggaaggacaaattaagtcttatccagatacgggtaagttggatacggtcttcaatgacttccaacccgttgctaaacaaggaacattgattattaacgctgcgttccacaaggcggacatgctatgggcgaacgagttaaaacggcaaactgtttctggcttgattattgagacaattgggcatcaagccattccagtgattgattggaatcaatcagccgaacagcgtgaattactcatccagaagatcattaaaaatttaaaatagagtgaaagcaatccggttgttggattgctttttttgtgctgaaattgaaaattagttttcaattgattagttgatagtttcagaaaattgagaatttatttaaaaaatggacaatggcatatccaattaacgccgtaccacttgttaacaaaggattaagattaatagtgaagaaaataattaacaccaaaattaaaaatatatatttgctgaaaacttattattttattacataaaacgtactctgaattagaaggagtagcgaatagaatgagacgaatgaagcaacgatttggattgttattagcggtggttgccacttttggcctgatgttgatggttagtcatcaaccagttcaggcggagaaagtgacttattcggttacgcccgtctatcctgataatcaaacggatacggagttgggctattatgatttaaaagttactcctggtcgaaaacaagaagttggtgtgcgggttcaaaatagtggaacaaaaccaattacggtcgatgtgacccctacgacagcgacaaccaatgaaaatggattgattgattatacaggaaccaatactaagcgagattacccgtcaggaagttgcaaaatataacgataaggccgttgaattaccagagaacaataactggtggttatatgtcattatcggtattatgattgtcattatcctactattgataattcttttatggcggaaatcacgcaaagataaagaacaataagcaaaatgaaaaccacgattgaaataatcgtggttttttaatggaaataattgacgtggttgtgtgaattctgtatactcatttctaacaagataagaggtcgcaaaaaccatgagtcgttaccctgaactgactaagcagtaatgagggataattaaaggggaatttgccgaaatgtcaatttgcttattcattttgatgttgggacttggttgaataaatcaaggactgtcgtaacgaaatgttacggggcgctatcaacggatattataaggctatcagtctttttgtcgtttttagcagacaaaaagactgtttttttgtttgctagaacgtggttggggctttttcttgaaatcatagagaaaagagcgaagtattatggcaggaaatgaaatgaagcgggagttaaagacgcggcatctttcgatgattgcgttgggcggtagtatcgggacgggcttgtttgtgacaagtggttcagcaattgcaaaggcaggtccaggtggtgcattgttagcctattgtgggattgggattatggtcttcttcttgatgaccagtttgggtgaaatggcaacgtacttgcctgtctcaggttctttctcaacctatgcaacgcggtttgttgatccagcccttggttttgcgttagggtggaattattggtttaactgggcgattacgttggcggttgatattagtaccgcggcactcgttacggaattctggcttcctgatatgccagggtggatttttagcttagtcgcactattattaattttcttgattaacatcacgagtgttaaatcattcggcgaaacggaatattggtttgcgttaatcaaagtgattacggtcattattttcttaggtgttgggttactaacgattctcgggattatgggtggccatcatactggcttgagtaacttcacttataagaaggccccatttgttggtgggttaccaatgatgttgagtgtcttcgtcattgctggcttctcattccaaggcaccgaactaattgggattacagctggtgaatcaaagaccccagaaaagagtattccaaaggccattaaacaagttttctggcgcattctgctattttatattctttcaatcttcgtgattgcttgtttaattccttatgatagccactcattgttgggcgcgagtgaaacgaatattgctgttagtccatttacgttagtgttcaaacgggctgggttagcttctgcagccagcatcatgaacgcagtgatcttaacatcagtgttatcagcggcaaactcagggatgtacgcttcatcccggatgttgtggtcaatggctgaagatggctatgcagctaaaattttcgctaagacaagcaaacgtggcgtcccagtaatggcactgattggtacaacaatcataggagctttaacctttgtgacaagtatttttggaactcggatttatttattcttagtggcagctagtgggttgactgggtttattgcttggttaggaattgctgtgtcacattatcgtttccgtcgtgcgttcaaggcacaaggtcatcagttgagcgaattgaaatatcatgcacgttggttcccatttggtcccatttttgcattcgtgctttgtttattggtgattgcagggcaagatattcaagcctttaagaacttcgattggacagcgattgggattagttatatgagcattccattgtttgtcgtactatatgtttactataaagtacggtacaaaactaagatgattccactagaagaagttgatttatcaaaacataaatagcgtgcggcttacggagcacgtttagattacaaaaaggcccgacaatttaagttgtcgggcctttttgcgttattgtagcgagcgttgatcaccagctttgaaatattgttgataaggtgttaatcgttgcttgaagagctcgttgactgtcacgaaatgtcgtttttgagcggtttgttctttagcaattgcgggtaatgccttaatcgttgcctcacttgtgtgcagtaggacaagatcaccacctgtaatacgctcatttacatttttggcaattgtcggcgcatcaatatctaagcgccaatcttccgaatcaacactccaagcgattagtgcccggctagcagcggttgttaattccgtactaggggtttcggttgtgacccgtaataagtgtggcaattgaccactggctttgaagtaggcggcatcggtttgcttgaggttatcggcaatttctgacgcgctcattgtatccaagtcatcatcgttgttatacgcttgggtgccaacgacatggccagctttgagtaattgcttcagttgatccggatgttctttagctgctttaccagtagtgaaaaaagttgctttgatgtttaaatcgtttagttgattaatgacactcgtaatagtgctaggttttaatgtcgtattaaaggtgagtgcaatctttttagcaccaccttttttggaaggcatttgattgtcttctgggacaaggttgggattgaggtatggaccaaccgttgccattggcagggcaattgtttcaatatcaagaggattctttgcgaatttcaatgttagaccatctgttgtaaagtcaaaattggttgcttgatcatttcccgggaaatcaagtgcttccaattgtgtaagttgttcgggggtataatcatgggcttgtaattgttggttaattgcaagttgacgaatcatcggaattgttgtgctatctttttgtaaatctttaaacgaaaccgatgttgtattgtgctgcatatcatagatggcttcagttccagtttgtgaaaataagcgttgataacgggtcttaaaccgtgattttacaaaaccataagcctcggcggttggcttaaaagcatacgtattgtcttgcaagttcttagcagtataactgacgtacaacgtgatatggtcaatgtcgggtgattctttgtgtgcttttgcataaagctgattaccgagtgcgacttcttgtttttgtaaatcgatattggccccattttggttttgtgggacaaaataatagatttttccatgcggtttggctgcagcgtagattttaaaggccgcgtattgaccgcttgcttggtcattaaaatcacttaaaattgactgctgcatattcttttgcgactgtttaaactgctctctcataaaatattggttctcaaaatacataattggtattaagaagagtgccagaacaatcaaagtccatttttgccaagtccgcatgaatactatcctccagtaagtttgtttatctaaatttagtatactgaatttaatcgcgacttgaaagtattattcgtgaactaatctacatacccgatgctccgatttcacccaatcatgataaagccgtttttggccaggaccacgattttccaggcattcaggtgcctgagattcgctctgtcacattagctgatccgggtgccaaaaatgcacagtctgtaaaatcgaatggccatgcgcagtttaattatgcggatggcacactgcatgcggccccgcagtacggaattacaggacaagtcgacctagttaacccgcctgattcttttgggttatactatcgtgttaatgcagatcaaaatgcagtgtggcaaccggtgataaccgattcgcagttgcatttatcggagagctttatggcacagctaattaatgctagtcagaatccgactactacggagcaagggctgcattgtgatgtcatgcggacaagcgacattgagtttacgttgtctgaaaaggtggcaagtgcacctattgcaaatgatgatttaaatccaatcgctaaattccaatttaaattaactttaaacggggcagtagaggttggcatcccgaaaacaattacgtttgatgacgaaattttgggtcaaagtaggggggtactaatcggacgattgcgctaaatgaggtaccaagtgtacaactaaaagtggcagatactggtacaccaaaagcgccgaaagtagtcatatgtaatccgttgtgtagtcattttgatttacaactaggctatctggggataaatcaacgacccaataatcccttttatatgcaagaaaattttaaataccgcttaaatgatagtgatgcaaaagcattaactaatgagtcgcctgataatcaatggattgatgggattctacagcggccaatcagtgagcaagatttaacgagttatggaaccacagttggttggaaacaaagtcagttacagttatcactaccttataatgatgcttatcagattggcccatataatgctgatttgaaatggcaattggtgatttaagttattagcgtgtcaggtttaattagagctgatgacgaaattattttcagcttttgaggcggtgtgtgttaataacgcattgccttttgttatacgcaacaaatatcgctgtagaatggttatgctttaatatcgattgatggtaaaatatatatcaattatttggaacaaggggttaagcaatgtggataccaatagtgtttatttaacatcggcagaaaaagataagtatgctcttttcttagatattattaatgtcaaatgggatgaattacccattaaaaaacgaatgagcatggctaaaaaaggcgaagcactaatcgatgacgtcaatttgaagcaagtggcaacattgttagaccgtaattatagtagcttatacaatacgtatgtcagtattgttggggatctgcaggcaatattagggacggaggaagatgatgttaagcgactcttcgcaattccaagtgatgtctatcatttatatttagtacaacattctgacatctatgatttcgtacagattctattgcggggcggggatatatcgtttaaaaccttcttagcagagcatgatagtagtaaagcaactgtattacgtcatttgaagcaagtccgcgatctaacccgcgccttcaacttacgggtttcatacgaaccaatccggttggaaggggatgagaagacaatccgattggtcttatccgccttatactggttggcgtctggtgggcatcaatggctatttgaagaaatcaatcacgaatgtgttttgtcggcctttgactatgtctgcgatgaatttcaattgcaaaagcctaacctattaacgcgcgaaattggcgccacgattctggcagtaacttattatcgggtgatggccggtgcagtcgtgcagcccgatgaaaaattagcaactattcggtatccctatcctaatttaatcagtgatttacttgcagccgatttcactaaagaatcaacgggattacgaacttgtttggcagagttaacgttaacggaagggcgttcagaagccgctggactattcttcttgttacggtattgtccagtaccgttacgctcaataacaagtactaaggtgactgctgattgggcagatgaacgttatataccagaaattcatcgttttgtgactgcctttttggagcgtattccatttgatattatgcatgagttagagatttcgcagcacacatatgatattttcaaaaatgcgttgttaacgactacggtgacgacctatatccttgggatggacgcgacctctgtcgtttttaatgaattagtcattcgtatgccgcagctaaaacccaatgaactactccataaaaaaattagtgataccgtagattacctcttattcgaaccagcttttagttttttagcaagtgggcgggagaatttgataaaggcttactataatttaattcaacaagtcatccagcagtatcatcctgtaagccaggtgaaggtcgcactcgtgattgagcaagattacattggctatatggatatcttaacagcactcgataatatcaaatatgtcgctgttagtacgaccgatgaagctttacgggatgcagacctgattgttcggacgtcgagcattgccttacccgaaaacgttaatccggaggcgttgtattttacgtggcgcttaaatgctagtagcgatcactatgcccggctgtatggcattattcatgaattatggatgcaaaaaggtacccaagcataataaaaaagccgttcgacaatttgtcgaacggctttttttgtgcaattaggcacccatatttgcttcttgttctgcgtttaaggctttcacccgttcgtcaatcatttcgatgactttttgacgatcagcttcgttttcaacgaagtctaatttgtcaccatcgatttgcatcttgggactttcgtcataggcttcataccaagcatcataacggctgtttaattctttataatagtcgtagagggttggatcggcttctagttgttcgtatgaacgaccacgtttttgaatccgtgaaagcattgtttcgaaactaacgcgtacatggattaataagtcagggcgtttcttgtgggcagcaaatggcaattcttgcatcatgttggctaataattcgtcgtagacacggacttcggttgcggtagcgcgaccaagatcagcgttcaagtggaagagtaatgaatcttcgaaaattgaacggtctaagatgttgttatcatctgtatatgcttgtttgatactatcaaatcgtttgtttaagaaatagatttgtagtaagaacgcatatttagttggatctttgtagaataatggtaatacttcattatcgtctactgattcgtaaaaggcttcagtgcctaagtgatcagatagatatttagttaaactagtttttcctgcaccaattgtgccagcaagtacgagcaatgtcatcagtctccctcttttgaccataaaatgtgtttaaattattgttgatatacaacatatggtgttttacaaccaaacgtcacttaaatattctagcatttctgacgtaaaaagcaatctttgattttaaacaacgcaatagttactatttgcacaatttatggtaggattaattactaattataaggatttttactagggggaatcggtttgaacgcaagtgagagtatttttctaacgcaagcggaaaatgataagtacgccttattaatggagattgttggtttaaaacgggatgagttgcctgttaaaaagcggattgaactatcgcgtaataatcagccgctcgttgaagatgtgaatctaaaacaagtagcaatgctattaaatcgcagttacggtagcttgtacaatatgtacatgagcattattggggacctaaaggaaattatcggaccggatgttgatgatattaaaaccttgttcagcgttccaacagatgcctatcactatttattagtgaataagtcagaagcgtttgattttatcaaaatcttactcaagggtgagaccgttacattccaagaattctgggaagcccatgatacgagtaaggcaacggcgctacgccatttaaaaggggtgcgcgacttaattcgctcatttgatatccgtatgtattatgattcacttcggttagaaggcgacgaaaataaaattcatttagtcttaacgatgttattctggatggcaacggaagggcatacctggccctttgaagatgttaaacgagacgatgcacttaaggcgttcgatgttgcgattgatcggttccaattggaaaaaaccaatattttgacccgtgaactaggggcgtattcaatcgtcctaacctatttccgattactacaaggtcacacggtttcaactgaactagatggcgattttatccgttatccagttcccaatatggtttctgaatatctaaaatagccctttgaagaccaagctttacggatcaagagcattcttgcacaaatgacccaagaagaagcgatggctgaatcattcaatatatatgacatcattaattttggaccgattcagattcaggatgctaatccctacatggaatcttacgaaacgcgatacaagcggtatattccagtgatttacgaatttgtagaagcttttattgatcaaattccgtttgatatcaagaaatacctaaacttagacgatgcgaattatcaaggtttcgtgcaaacgatgatttcgatgacgatgaccacgtacatgtttaaacaagatgtgacatcggtgctcgctgaccaaatgatggaaagtgttgaatatctcaagccaaatgatgtcctaaaataaaatattgatgatacggtggattacttattaatcaatccgaaagtgtcattcttagtcaaattacgtgaagaattggtcagtggttactacaacgtcttgcgtcagatgattcaacggtttgcaccgatgaataaagtgaaggttgtcgttgtgacggaacaatccttcctcgggtactttgttttgatgactgcactgaatagtgttttgtatgcggatgttagtcaatctgacgcggatttaatggatgctgatatggtggttacgacttcgatcattgatttaactggcatcgttaacccagaagcggtgatgtttaaatggcatcaaaatgcagatagcgatcattttggacgtatgctcggtttattacggggtctatggattcaaaaatcatctattgatgattgaatttaaagattaaatgcggtattcttacattaagaagtaaacacgtgaataagcgcctatatggattgacagagagataccggttggtggaaggtattgaatccagcattccagcgcaatagtgggtagtgatgaactacacggttcctggccgttatcagtaattgagggcacctattatttgtagtgggtgaacttgggtggtaccgcgaattgaagtcttttcgtcccaattaagggatgagaaggctttttttattgttgttaattaaagatcattaaaaggagagagtgcaatgttagatattaaagtcattcgagaaaatgtccaatgggcaaaggataagttagctagccgcggtgttcaagctgcagaaattgatgaggtcatcgcattagatgaaaaacgccgtgccttaattgtgaagaccgaagaattgaagaaaaatcgcaatgctgcctcagaagccatcgccgttgccaaacgcaataaagaagatgcgactgaacaaatcgctgctatgaagaatgttggggccgaaatcaaggctttggatagcgaattggctgaagtgaaggccaaagtggactacatcttagtccgcttacccaacttcccagatgattcagcacccgttggcccagatgaaagttttagccgtgaagaacgcaaatggtcaacaccccgtgaatttgattttgaaccattagcacactgggatatcggtgaaaaattaggcatcttagactttgaacgcgccgctaaagtatcaggtagtcgctttgtttactataagggtgccggtgcacgtcttgaacgggccgtttataacttcatgttggatcaacatgctaaagaaggctatgaagaaatgatcacgccgtacttagtgaatggcgaatcaatgtttgggactggccaatttcctaagtttacggaagatgtttacacaatgaccaacgaaggcgaacccatgactttgattccaaccgccgaagtgccattgacgaacttctaccgcgacgaaatcttggatggcgcacaattgccaatctacttcactgccttatcaccagctttccgttcagaagcaggaagtgccggccgtgatacccgtggtttaatccggatgcatcaatttaacaaagttgaaatggtgaaattcacgaaaccagaagaatcattcaatgaactagaaaaaatgaccgccgatgctgaaaatatcttaaaagcattgaacttgccatatcacgtcatcacattggcaactggcgatgccagcttcacatcagctaagacatacgatatcgaagtttggttaccagctcaaaatacgtaccgtgaaatctcaagttgttcagattgtacagacttccaagcacgccgcgcccaaattcgttaccgtgacgaagatggccacgtcaacttggtgcacacattgaacggttcaggcttagcagtcggccggacagttgccgccatcttggaaaactatcaaaacgaagatggcagcgtcacaatcccagaaccattggtaccatacatgggtggcatgacgaagattgaagcaaaataattaatttaataggaagtcatttgtttcttccataagggagacggttgttatataaataacgaccgtctttttttgctagattagaaacagttgtgaatagagaatagtttggcgcataagacttgaaatttaaatgaaaaaaggttagactaatttagttatcgtggatattgaatgtaatcaattaagcaacttatataattaaaggagattttagcatgaagatgattcaaaatgaatttaagttcattgccaagaataaaatcatcatgatttcgttaatcgcaatcgtgtttattccgttcttgtacagtgtctttttcctgaaatctgtctgggatccttacggtagcactggtgaactaccagtcgctgtcgtaaataacgatcaaccagcaacttacaacggtgaaacgttgagtgctggtaaggatatggttaaggaattaaagaaaaacgaccaactaggttggcgtttcgtttcagccaagaaggctaagcaaggtttgaaggataaggaatactatacagtcgttactttacctaagaacttttcagcaaacgccgcaacagtcttggataagaatcctaaaaagatgcaaatccaatatgaaacaaacgattcattgaacttcatcggggaagttatcagtgaaatgggtgccaaggaattgaacgcccaagtacgtgaaacagtgacaaaggcttatgctcaagtcatgttcaaacaagttaaaacagctggtaaaggcttcagcacagccgcttcaggggctaagaagttaacgaagggttcagtcacactttcagatggcttgaacacttatacagctggtgttgataaggtcaacgatggtgtcatgacaatgaagaccagcgtgacacctttatcagacggtattcaaaaattagcagccggttcaggggccttaaacacaggcttacaaacattgaatagcaaaacaggcgcattagcctcaggtgctagccaattggacagcggtgccaaccaattgaacacaggtctacaaacattgaacagtaagacaggcgcattagcttcaggcgcaagccaattgaacaacggtgccggtcaattaaacacaggtttacaaacgttaaatagtaaaacaggtgcgttggcttcaggtgctaaagatttaaatgacggtgctggtcaattaaacacaggtttacaaacgttaaatgatggtaccggacaattagccggtggcgttacaaaattaaagagtggattaaatgccttagatagtaatagtgatcagttagttgctggtgctggtaaagtaaatggcggcgttgatcagttaatcgatggtagtcaacaattaagtggcgccttatctgctgctgctaatatgattgatgatcagttagatagtaaatcagaaaagttagatttattgagatcaagcatgggcgaattacagactggtgttgagaaacttaacgcggggataaatagtccacaagcagatgcaatttcaaaacaagtaacaacagacttaacggcagtagcaactgatgctacaagtacaggacaatcattacaacaaattaatagtaaactatatgataaaaatgtaagtacaagtgcagctagtcaagttgctaacactggtgcgcaattacaagctattacagaagtagtttctgatccacaaattaaagcagcattatcaaaagatccagctttagcacagaaactaaataatgcacttcaaagtgcggggactagtgttactgctacagctaatcaacttgcctcatctggtgcagatttaaatacgattaaaactaatactgaagatactggtgtacatctaaaatcagttcaaacgcagatgactaacttaatgacaagtcttcaagcattgaaaaaaggtgtaaatgaattatatgttgcagcacctcaacttaaatcgggcgtagatcaagcaattgatgaattaacaggtggtttaaaaactgttagcgcaggtttaactaaaactagtgataaaccttcagatatgggggctatccaagcaacagatactatcaatgcaggcttaagacaaattaaattaggccttgttgggactccgagtcaactaggcttaattccaggattaagcgcctatacagctggcgtatcaaaagcaagtgatgggacaaacgagttaaatagtaaggtaccagcgttgacaagcggtgttggacaattagcaacaggttcaaaagccttgtatgctggtacaacacaactaaacggtcaagtgccacaattgacaagcggtgttggacaattagcaacaggttcaaaagccttgtatgctggtacaacgcaattaaacggtcaagtaccacaattgacaagcggtgttggtcaattagctgctggttcaaaacaattagcaactggtactggtcaattgaatagccaagtaccacaattaacaagtggtgttagtcaattggcaacaggttctgaaacattgaacggtggtcttggtcaattaaacgctaagatcccaacgttaacgagtggtgttggtcaattagccgatggtacaagtcaattagctgctaactcagctaagttaaacgacggtgctggtcagttaactgatggtaacaagacattagcaactgcccttaagggtggcgcaaaacaagttaacgatatccaattaacgaataagacagcggatatgttcgctgcacctgctgaattgaaacattcaaactatagctatgtgcctaactacggtcatgctttagcaccttacgttctttcattagcattgttcgttggcgcaattgtcttcaactttgcttatccaattcggaagatctcaatgactggtcaatcatcaacagcatggttcttaagtaaaatcacggttggcgctttagtcgctgtcgggatggcaattatcgaacctgccttaatgatggttgctggattaaacgtcgatcatccagcacaattcttcctaatggcaattaccttctcacttgcttcgatgtcgatcattatgttcttatcaatgacatttgataatcctggtcgtttcttagcaatggtcctcttgatgcttcaattagggggttcaggtggtacattcccaatggaaatcacgaaccacttctacaacgtcattcacccattcttaccaatgacgtattcaattctagggctcagagaagcaattacatctggtttaggtaccggtcaaattgttcaatcattctttgttctcttagccttcatcgtcgtagcactcttgctattatggttaggaatgaatcatttacaaaaaatcggcaacggtggtcgctcacaattagacgacaaccaaaaattacaagatgtcgaaaaataatcactagaaaaagcctgtcagctaaatgctggcaggctttttttagtgcaattaagtattcttaacgtctaagaatgtataaccgcggcgatcataacggttgcgacttcttgagtattcaatcggttggccattatcgagataaacaacttgttcaacttctaagacgggatcagttggggcgcagtccagatattgctggtcatattcatcggccttgtcggcttgaatattgcgaaaggcacccgcgaacgtgaggtgtagggtctccttaaggtaggtgtagattgactgtgcgagaacatcatcagttaatccgggaactagactcactggcatgtaggtatgttcgaggacgctattaacgccgtcgataatccgcagtcgaatgattttgtagacgggctgttgatcagcaagcattaagcgatctttaatctcaggcgttgggaaagtcacctcaaacgtgatgaccttacttgagagtgttttaccaatgtcggctaagtcgcgtgacatcccacggtattgatccgctggtgccgttgatttattccaaaaagagtggtctaacacctttgtaccagcgccgcgtcgtgatagaacgagtccttccatcgttaaaatcgtgattgcttttttgatcgtcattcgactagcatcgaattcttgaactaagtcggtttgattgggtaacaacgtattagcaggatagcgcccttgtttaatccgttgtcgaataatgttggcaatttcttcgtattttggcaaaaaaaataccccgctttctacttatagtttagtggaaacaacggggtaaaacaatctttagtttgccagaggatcttgcagatgcttttttcaaccgttcattcttagatcctgccgtgaagggggaattccccgctgatttagtcgcgattttaaaagatctagccatcttacctgactatcaaccagctgacttagcattgattaaggcgaacactgtggatttattggggattaattattatcaaccacggcgcgtgaaggccaaggaaaccccaatcgaccatacaaacggcccgatgccggatgattttttcgacaattacgatatgccgggtaagaaagtcaatccgtatcgcgggtgggaaatctacgaacgtgggatttacgatattttgaaaaacgttcgcgaaaactacggcaacattgcttgctttatttcggaaaacgggatgggcgttgaaggcgaagaacgttatcgcaatgcggatggccagattaatgatgactaccggattgaatttgtacaggatcatttgaagtatgtccatcaagcccttcaagaaggcagcaactgtctcggttatcatatgtggacgtgtatggataactggtcatggaccaacgcctataagaaccgctacggttttattgcggtggacttagaccatgattgccaacgggcgattaaaaaatcaggtcattggttcaagcaagtcgctgatcaaaatgggtttgaagcctaatcgaattgaaaaagcacaatcgacgaaacaatcgttgattgtgcttttttgtctgttatattcgggtaaacttgataaccatcaagttcttaaaatcggctttcttctatactaaagacaatcgttaggaagaagggattttaaatgaaatttcaaagatggttacaatccgtgaagaatcagattgcgctgactgttggcggattgattgcagtggcctatagctggtattggcttggtggggcggtaattgtgatgcaagggctgttattggttgcgtcaatgatgggggttgcaccgattttgatgcaggcgtatcaagcgctaaaagtgaaagtcatcagcattgatttgctggtcacgattgcggtattgggagcgctaatcattggtgagttcaatgaatcggcgattgtcacgttcctctttttattcgggagctatcttgaacaacgaaccttgaaaaagacacgagaatcaattcgcgcattgtctgaaatggcgccacaaacggcacaagtgttagcggccgatggcactactacgacggtagatgttgatgatgtcgaaatcgatgatcaagtattggttaaagctggcgctcaggtgccggttgatgggcaagtcgtccaaggtagtgcctatgtcaatgaagctagcatcactggcgaagcacaactcgttaagaaaatagtgggtgatgctgtttattccggggcaattgtggataacgggacattgacggttaccgcaacgcaggttggggatgatacaacttttgcccaaattattgaattggttgaagaggcccaagatagtaagtcacccgcggaaaaattcattgatcgttttgcgacgtattacacaccggccgttttagtgttggcattagcgattggcttaatcacgcgcgactttaaactcgcgattacgattctggtgcttggttgtccaggtgcgctagtaattggtgcgccagtttcaatcgtggcggggattggcaatggcgcgaagcatggggttttgattaaaggcggcgaagtcgttaatgcgatggctggcattgatacgatggtctttgataaaactgggacattgactaaaggggacacggcagttgcacatgtgcaattttatacagcggcagaacaagcaacgttggcagtgactaccgcggttgaagcacagtcagatcatccactggcgactgcgattgtgcagtatgcacgggaacgaggggtgacagacttaccaactattgaacgaattgaaacgctcaaagggttgggggtacaagctgaagtcgctggtcaaacaattcggattgggcgggccaagatgatgactgaagcagggatccggttaaccggtgcgcagattgcggcgatcacggccagtcaaacagcagggcaatcaaccgtgttagtcgcagttgaccaacaagttgttttattaattgggattgctgatacggttaaaccggaagccaaggcagcattaacgcgtttgaaaaaagcgggcgttaaacatttagtcatgttgacgggcgataatgaccagacggccgcagcaattgccaaagccgtcgggattactgaataccacgcgaatcttttgccggcagagaaggttgaattcattaagacctaccaagcaaacggtcaaaaagtggcttttatcggggatgggattaatgatagtccttcgcttgcactggctgacattggaattgcgatgggttctgggacagatgtcgcgattgagacatccgatattgtgttaatgcaatcgacgttatccgaattagtgtatgccgattacctcacgaaggcgacggcacgtaatacagttcaaaatattgtgattgctgttggaacggtcggattgttattgcttggcctgatgcttggctgggtacagatggctagtgggatgtttgttcatgagattagtattctggtcgtgattttcaatgcgatgcgcctgattcggtttaaagttcgctaaacttgatggcggtcaatttttaatcatgcagcgcgcgatatagtaacagtaatcaaacgaaaaggtggtcattgaaatggcaaaattggtgatgcaattagacgagctatcatgtccgtcatgtatgcaaaagattcaagcgggtgtcagtcaacaagatggggttgaatcagtgaaagttctctttaatgctagtaaagtgaaagcagaatacgatgaagccgtgacaaacccagatgaattaacacaagctgtaactgacttgggctacagcgttcaaagtatcaaagtgaaatagggggcaattaatatgttatctaatgaagaaatcgaaacacgttaccaagcagaagttaaacaagctgatgttgatcaccatacaccaaccgcgggtgccatgatcggccatgtgatggctaacttaacgattcaacggcgtaaactccgtcaaatgaagtggtacgctaaaggaatcaataaccaagcttttaaagcgcaattaaccacattgcttgcagaaaatgatatgctattagacaagacggccgaacggctactagacgaaggtgaagtgcttccgacgacgcaagctgagtataccgagtatgggatgctgacagaagagccgcggattaagtactgggagatgccagcgatgattgcggaaatggttgcggactataatactgctaatctatttgtttcccgtgcgattaaacttgcggaaaaagaagaacgatttgctttagcggcggatatggtttctttaatgggctacaaccaacaccaaatccgtgaattgcaaagccaactaggaaaagcagcgcgcgaaggattagatgaagaagacgacgattaagatagagggaagtgggctaggtgactgacgaacaacatatttgtgctgagatagtaccgatttttaatcatttagaccgtgatagtttggtcaagatttcggcagttacccatcatgaacgcgttaaaaaagggacgttggtgatgagcccgatagatcagaagcggttagtgatcttagctaaggggagcattaaggtctatcagctctctacagcaggcaaagagcaactgctacgcatgatggaacccggtgattttgaaggagaaaagttactttttaaaacggaagatgagccgttgtacggtgaggtcttgcaagatagtacaatctgtacgttatcgcggagtgattttcaacagttactgttagcctatcccgaaattagtttaaagttactagaagcaactactgataagatgacgcgtttggaaaaacaggcgaacttaatcaatatcgagtcagttgaatccagaatcgtgacttatctacttgatttagctaaagcgagcggagaaactgaagtgatgattccgatgaagttaaaagaactggcaacatatattggaacaacgcctgaaaccttatcgcgtaagttaaaacagttagaaagtcatgcgctaattgaacgaaacggtcgaaagattgcgatattagactatgaaaacctagaagacttctattaggacgtgaagattctgcgaattttgcaggatctttttgtttacctataccaatttggataaaattggaacaaatagcagtttaaaagtattatgagggataatcaatagcgcagattagggatgagaatccgggtgatatgaattattttttcgatatttatacaggaattcaatttttttgaatttttttcaaattagtgattgacgttgtcccactaggatggtaagatattctatgtcgtcgagagatgagcatgtagcaaaacgttgaatgaatattacttaaaaaaagttgttgacattcgggtttatacatgataagatagattgtgttgcttatgagttttaacttaataagtgattaactaatatctgatgtagactgtccaaaaaattttgagacagtggctaacttgattctaaaatgcgcggctgagaaaaacaacgattaaccgccataaaaacgggttacttattggtgccgtttgtgtcgtctgcgctatcgcaattcctcttgtacttgctgcctattacctattctaaaaaagaccaatcataatgaaaattcattatgattggtcttttaattttggaaattaacgtttcttagttgctttcttacgtgctttagcaagtgctttttcacgatcacgcttttctttttccttggcttcgcgttcgcggcgaatcttaaatggattttgaatcaccattgtttgacccactgaaaaggcgttcgttaccacccagtaaattgaaacagcagacgcgatgttcatggccatcacaaaaatcatgattggcatcacccacaacattgcggatgacgcagcattcttcgtgggttgcgacatcattgttagatacgatgttgcaaatgtaaagatcgcagccaagatagccataataaagtaaggatcagctttcccaagttgcatccataagaacgtcccactctttaaagcagctgttcgatagattgcttggtacaaggcaatcaacactggcatttgaaccactaatggtaaacagcccacaactggattgacgcccgcttcagcatatagcttttgcgtttcttcgcgtaacttctgttgtgtctcagcatctttagaagcatatttcttttgaagtgcttgaatttctggtgcaacttcttgttgtttgagcatgctcttactttgccaccaagttaatggcaagataatcacccgaatgatgatggtgaaggccacaattgcccaaccataactgccaccaaagatgtctgctaaccataaaataaagcgggagaagttataaataacataatgatcccagaagccagtactgctactatcaactggtgatgtactacaccccgctgcgattagcatgaacaagaatagactggccactaataatagccgtttgcgattttttgaactcactgtaatccctcacttattcagaagcagaatctgcttcttcctttaatagctttgctagttttaagacgtgcattaaattctgtttggtttccgccattgttagttggttagcgccgcgtcttgcgatcactaaaaagtcgacagtctgtggtaactctggcttcaactccaacaagctctggcgaatgtaacgtttaacctgattacgcatcactgcgttacccacttttttacctacggacaggcccacccgaaaatgcttttgaccaggtttttctaattgataaaccacaaaattgcggttggcaactgaatgacctgcttcaaaaaccgtttggaaatcctgttcttttttgacgcggtacgactttctcataattcactccggcatttcatttaattaattgaggataataaaaaaaccactgaagcatcagtggcctatgcagataatacttttctgcctttagcacggcgtcttgcaagtaccttgcgaccgttcttagtattcatacgtttcatgaaaccatgaacacgttctttatggcgtttctttggttggaaagttctctttgtagtcattatactggcacctcctaattgactgtgtctattgttttcatatctgagaaacaacgggtgataaataccacctacgacattcactaaaatataatagcatatttctatagaagttaaaacactttccataaaaaaacagaataaatattcttatccacaaaaaaaataattcattggctttcttgtggataactgattataccgaatcgtccgatttttgtcacgcacagattacttgctgatttatccagaaaatcacagggtgttactatgttatccacaagctattttcaagctgtgcacaaattgataaaaccttttaatagcaagcatcagatacacacacttttttgtggataagtgcgataatcgtttgttgttttctgttttccacagtccccactaaaagttatccccggtcgtgtgttcaagtggataactttttaattcattcctgtggattttgttcttgttgtggaaaacttttttttagaatgctagaatgtagatagtctttctttattgaactttttttcaataaagtggttattttacgtgaggaggacacgctacatgcctgatcttcaggaactttggaactatttgcgggaagaattccaaaatgatttaacacccgtcggttttaatgcttggattaaaaccgccaaaccgcttgcttttagagccaatgaaatactgatcgaagtgccttctcccttacacaaagagtattgggaaagtaacttggccactaaggtcgttgaaggggcctacgaattcgcagagattgaattgacccctatttttctgttacctaccgaagccgagcagcttcaagctgaaaaaccagctgaagaacgcagcctcaccaaagctgaaaccccaacctttttacgtgaaacgcatttaaatagtaaatacacgttcgacacgtttgtgactgggaaaggcaatcagatggcccacgctgcagcactcgttgtttcagaagaacccggtgttttatataatccactttttttatacggtggagttggtttaggtaaaacccatttgatgcaagctatcggtcaccagctgttactctctaaacctgacacgaacgtcaagtatgtgacgagtgaagcttttgccaacgacttcatcaattcgattcaaacgaagaatcaagaaaaattccgccaagaataccgaaacgttgatttattattggtcgatgatattcaattttttgcggataaagaagggactcaggaagagtttttccataccttcaatgatctctacaatgataaaaagcaaattgtcttaacatctgatcgtttacctaatgaaattcccaagctccaagaacgcttagtttcacggtttaaatggggcttgtccgtcgacattacgccgcctgatctggaaactcgaattgctattttacggaacaaagccgacacagaacgcctcgaaatcccagaagatactttgagctacatcgctggtcaaattgattccaacgtccgtgaacttgaaggttcactggttcgggttcaagcttatgcaaccatgcaaaatgctgaaattacaactagtcttgccgccgatgcccttaaaggcttgaaactcaatgggaagtcgagtcaactttcaattgctaagattcaatccgtagtcgctaagtactacagcctttcaatcactgatttaaaagggcgcaagcgcgttaaagaaattgtgctcccacggcaaatcgctatgtacttggcccgcgaaatgaccgacagttctcttcccaaaattggacaagaatttggcggtaaagatcatacaacagttatgcacgctcatgaacgaattagccaagctttaacgagtgatcaaaatctaaaagatgccatcttagatttgaagaataccttaaaaggctaaatataggctgtggataaacgctaaagttatcctaagagttgttctcaacttatccacaagtggaaaactagacactcttttgcttttctatgttatccacaggttccacaggccctactactattacttaaaattcttttataatatatatatctattttccttcggaggtttaacatccatgaaattctcaattaaccgcaacgtgttcatcaaaacccttaatgatgttcaacgtgccatttcagctaaaacaacgattcctattttgacggggcttaaattagtgctttcgcaagaaggcttaaccttaaccggtagtgatgctgatatttcaattgaagcaacccttgctagtaatgatgaaaagaatcaattagtcgttgaagaagcaggtgccattgttttaccagcccgcttctttagtgaaatcgttaaaaaattacctgaagatcaaatgacgattgctgttggtgacaacttccaaacaaccattcgttcaggtaaatcagaatttacaattaatggcttagatgctaatagttatccacatctacctgaaattgcgggacaaaatccgttcagtatcagtactgatgtgcttaaacaattaattcatcaaaccgtcatcgctgtttctaaccaagaaagtcgcccaatcttaacgggggttcatttggttttaaaagatggcgaaatgttagccgtcgcaacggacagtcatcgacttgcacaacgaaaattaaccgtttcagtaccaagtgatgggaactacgatgtcattattcctgggaagagtttaattgaactttcaagaacgttagcagacgaagttgaaaccgttgaaattcggattgctgaaaaccaagtgctctttaaagccggtaacttagccttttattctcggttgttagaaggaaattaccctgacacagcacgtttaattccaacttcttcaagtacacaaatcgaattcgatgcaccggtcttattagctgcgattgaacgggcatcattgttgtctcatgaaagtcggaacaatgttgtccggttgacattgaatacaacggacaacacggcaatcatctacgggaactcaccggacgttgggaatgttgaagaagcccttcaatttgaaaacctaacgggcgaagatctcgaaatttcatttaacccagattatatgaaggatgctttacgttcatttggtcaaacaaccatcgtgattaactttacggcagctttacggccatttacattggtcccaagtgaagatcaagaacactacattcaattaatcacaccagttcggacattttaataatcaaaaaacgccgcatttaaaaatggggcgtttttttttgcgctaaaattaaaataaattcgtttacagcgatttcggataaaacaagtaggataaggttaaagcacttaaaaacgctcagaaagcattttagctgtgtttatttgtttttaaggcaaaaaaagtctataattgtaaggtataacagatcggtattagcgcagtaattaatatcgttaagaatggtgggttgagtatggcacaagaaattaaacttgaagctgagtttgtgacactcgggcaactccttaaagaggccggtgtgattgaaacaggtgggcaagcaaaatggtttttaaaagaaacaacggttttagtgaacggagaacctgatgatcgtcgcggccggaagttatatccggaagacgtcgttgaggtgcccgataacggccagtttgtcattaaacaacaagaaagattgtaggcgactatgtatttaagtgaactccaacttgatcattatcggaattacgagcaagtggacgtccatttctcgccagatatcaatgtcttgattggtgaaaatgcgcagggcaaaacgaacttgctagaagccatctatgtgttggctttggctcgttcgcatcggacgaataatgatcgtgaactgatacaatgggatggcgaattcgcaaagattaccggcttggtacaacggcaaactggccacacaccattagaattggtggtcagtcaaaaaggtaaaaaagcgaaggtcaatcatttagaacaggctaagttatcccaatatatcggtcaattgaatgtcgtcttgtttgcaccggaggatttgaatatcgtgaaaggctcgccagctgtccgacgacgctttatcgatatggaattcggtcaaatgagtgcgaagtacctgtataacatttcgcaatacaagtcgattttgaaacagcggaatcagtatttgaagcaactacaacgacgtcaagctaaagatttagtgtatttaggcgtattgtccgaccagttagccgcttatggcgcggaagtcacggttgctcgccgtgaatttctgcaacagatggagaagtgggcgcagaagttgcatcaagagattaccaaagagcgggaagttttgacgtttaaataccaaagtcagattccagatgagcagttggtacttgatgccgaaggtttataccaacagtttcaaatcctatacgagtcgcaccaaacacgggaagtcgaacagggcacgacattggttggcccgcaccgcgacgacgtgttatttttggttaacggtaaggacgtgcaatcgtttggctctcaaggccaacagcgcacaaccgcgttaagtgttaaattggcggaaattgacctaatgaaggaacaaaccggtgaatatcccgtcctattactggacgatgtgttgtccgagcttgacgatttacgccaaacacacttattgaaaacgttccagaataaggtgcagacgttcttaacgacaactagtcttgaaaatgtcaaaaaagaaattattagtgcgccacgggtgtttaccgtgacaaacggcaccgtgacagtggccgatgcagcagcaaattagtcaaaaaacgatcaaacggaggtttttttcttggcagatgatcaaatgaatcaagagacagaagcacaaatggaagcaaaagaagaacgcgctaaatcttatgatgccagtcaaattcaggtgttagaaggcctagaagccgttcgtaaacgaccagggatgtacattgggacaacgagttcccaagggttgcatcatttggtttgggaaattattgataatgggattgatgaagcactcgctggttttgcaacagaaatcaacgtggttgttgaacccgataatagtattacagttacagatgatgggcgtgggattccagttgggattcaagctaagactggtaagtctgcgctcgaaaccgtctttacaatcctgcatgccggtgggaaattcggcggcggcggatacaaagtatctggtgggttgcatggtgttggggcttcggtcgttaatgccttgtcaacggaattagatgcggttgttactcaaggcggtaaacgctactacatcgatttcaagcgggggaaagtgcaaacgccaatgaagatgattggtgacgcaccagcccatgaacatggtacgaaagttcattttgtccctgatgctgatatctttactgaaacaacggtgtatgatgataaaattttaacaacgcggattcgggaattggccttcttaaacaaaggcttgaagttaacgttcaccgacaaacgggctgaaacacatgaaaaacttgaatttcactatgaaggtgggattaagagttacgttgaatatttagacgacaaaaaagagacccttttagacgaaccaatctatgttgaaggtgaacaaaacgggattaccgtggaagttgctttgcaatatacgaatgattatcggacgaacttgatgacctttgccaataacattcatacctacgaaggtgggactcatgaatctggctttaagacggcgctcacgcgggttattaatgactacgcaaccaagcaaaacatcttaaaagccaacgacacgaacctttctggggaagatgtgcgtgaaggcttaacagcggttgtctcggttaaacatccggatcctcaatttgaaggtcaaacgaagacgaaattaggcaatgccgacgcacggacggtgactgatcggatgttctctgatcatttcacgaagttcttgatggaaaacccatcgattgcccgccaaattgtcgacaaaggctcattggctgccaaagcccggttagctgctaaacgcgctcgtgaagtgacacggaagaagaacggtcttgaaatctcaaacttgccaggtaagttggccgataatagtagtaaagatcctgctatttcagaattattcatcgtcgaaggggattccgctgggggttcagcaaaatcaggccgttcacgtttaacgcaagccatcttgccaattcgggggaaaatcctgaatgttgaaaaagctagcatggaaaaaatcttggcgaatgatgaaatccggaccttatttacagcaatgggcactggttttggccaagaattcgatgtggctaaagcccgttatcataagttgatcatcatgaccgatgccgatgtcgatggtgcgcatattcggacgttgcttttaacgttgttctaccgttacatgcgaccaatcgtcgaagcgggttacgtgtatatcgcacaaccacctttgtaccgtgttaaacaagggaagatgatgcgctatattgattctgatgaagaattacaagaagtgttagggacgctccaaccaagtcctaaacctgaagtgcaacgttacaaagggttaggggaaatggatgctagccaattatgggaaacaaccatggatcctgaaaaccggcgcatgttgcgggttaacgttgaagatgccgaagaagcggatcaaatttttgaaatgttaatgggcgatcgggttgaacctcgtcggattttcattgaagaaaatgccgtttacatggatccaaagagcatcgatgcatagcgtgttcgccgcttaaacggacacattgaaagactgactgagaggggtttatagattaatggcaaacgaaattggccaagacggtcggattgaaaacgtcaatttatctaagacaatgcgtaaatcattcctggaatatgcaatgagtgtcattgttgcgcgtgccttaccagacgttcgtgatgggttaaaacctgttcaacgccgaattttatacggaatgaatgaattaggggtcactcccgaaaagccttacaagaaatctgccagaattgttggggatgttatggggaagtaccatccacatggtgattcagcgatttatgaagcaatggtgcggatggcacaagattttagttatcgttacatgttagtggatggtcatgggaatttcggctctgtcgatggtgatggtgctgccgcaatgcggtacaccgaagctcggatgagcaagatggctgtcgaaatgttacgtgatatcaataagaatacaattgattatgtaccgaattatgatgagtcagaacgcgaacccgctgttttaccagcccgtttcccgaacctactcgtcaacggggcgactgggattgccgttgggatgacaaccaatattccaccgcacaatttagccgaagtgattagcgcattacacatcttgatggataatccagatgcgacaaccgctgatttgatggatgccttacctggccctgattttccaactggtgggttagtgatgggtaaatctggtattcgccatgcgtatgaatctggtaaagggacaatcacccttcgcgctaaagtggacgttgaggtccaaaagaacggcaaagaacggattattgtcactgaaattccatacatggttaataaggccaagttggtcgaacggattgctgaattagcccgtgacaaacggcttgaagggattaccgatttaaacgatgaatctgatcgtgatgggatgcgcatcgtaatcgatgtgcgtcgggatatgagtgcttcagttgtcttgaataacctgtacaaattgacaccattacaaacctcattctcatttaatatggtggccatcgtgaatggtgcccctaaagtcttgagtttgaaatcaatcttggaacactacttagtgcaccaagaagaagtcattcgtcggcggactgaatttgatttgaagaaggccgaagcgcgggcgcacattttagctgggttacgcattgctttagaccatatcgatgcgattattcagatcattcgtggttcgaatacaggtgatgccgctaaggtcttgttgatggatcgttatgatttatcggataaacaagcgcaagccatcttggatatgcgtttagttcgattaaccggtttggaacgtgataaagtcgaaaatgaatacaataatttgatgactttaattgctgatttgaaagatattttagccaaaccagaacgcattaagaagattatctacgatgaattgcttgaactccaaagtaaattcggtgacaaacgccggacagaattattggtgggtgaagtgcttagtcttgaagacgaagacttaatcgaagaagaagacgttgtgattgcattaacgcataacggctacattaaacgattaccagccagcgaattcaaagttcaaaatcgtggtggtcgtgggattcaaggaatgggcgtccatgatgacgacttcatcgaacacttgctttcgacttcgactcatgaagtgctcttattcttcaccaatactgggaaagtttaccgtgccaaagggtatgaaattccagaatatgggcggactgctaagggaattccaatcattaacttattaggcattaattctgatgaacgcgttcagaccatggttaatgttggtaaagaagtgcaagacgaacaatcactcttctttattacccgcttagggacggtcaaacggacatccgtttctgaattcgccaatatccgtagcaatgggttgaaagcattgaccttgcgggaagaggatgaattaagtaacgtcttgatgactgatgggcaacaaaatatctttatcgggacccataatggttatgctgtgtcatttagtgagacagctgtccgttcgatggggagaaccgctgctggtgtgcgtgggattcggttacgtgaaggcgactatgtggttggctctgacttactgattccgggtcaagaaatccttgttatctctgaaaaagggtacggcaaacggacaccggttgcagattacccaatcaagggtcgtggtggtaaagggattaagactgccaacatcactgaaaagaacggcccattagctgggattgctgccgtcactggagaagaggatattctcttaatcactgatactggcgtcttgattcgtttcaaggtcgctaacgtttcacaaactggccgggccacacttggtgtgcgtttaatccgggtggatgacgaagcgaaggtcgcaacaatggcgaaagtcgaagctgaaccagatgaacctgaaacaccagaagcaacgacggcaccaatagcaccaactgatgacactactgatactggcttagcacaagtcgatgaattactcgcgcgggctgaagccgatcaatcggcatcagatgatcaagattcagaaaattaattaaattaaaaaaataaaaatcgtttctgcgtaaatacacttgtaacaactgttaccaagcgtgttagcagcaacgatttttattttagattgtattttaacggccgttatgatagaattttatcttgtgagtatctgtgatttagacacagggtctaaatcgtgaggctaatttttattagtcagttactccttgttcttacacaggtaagaacctaaagtccataaggaggtgaacagtcatggctcaatcaaaatacgaagttacttacatcatctcaacaacacttgatgaagaaagtaaaacagctcttgtcaaccgttacgacggcatcttaaaagacaacggcgctgaagtgattgattcaaaagactggtcaaaacgtcgtttagcttatgaaatcaacaatcaacacgaaggcatttaccatatcgtaaatgttttagctgataatgatgaagctttaaacgaatttgatcgtctagctaagattgatggctcagtattacgccatatgatcgttaaacgcgaagactaattttgaattgtaattattgaatagaggggagctgacagaatgattaatcgagttgtactcgttggtcggctaacacgcgatgttgacttacgttacacttctagtggtgctgctgttgggactttctcaatcgcagtgaaccgtcaattcacgaatgccaatggtgatcgtgaagcagactttatcaactgtgtcatctggcgtaaatcagcggaaaatttcgctaatttcactaagaaaggctcactagtcggagttgatggccgtctacaaacgagaaattatgaaaaccaacaaggtcaacgtgtatacgtaaccgaagtggtcgttgataacttctcattgttagaatcacggacaacaacggagcaacggcaaggggatggcgcaagccaaaactttaacaacaatcaaagcaatggtagccaacaatctggatttaccagccctcaacaatcgggtaatccatcagctgcaaataacactcaagccgatccatttgcaaataatggtcaagcaattgatatttcagatgatgatttacctttctaaaataaactgttttggaaggaggaactttcaatggctcaacaaagaagaggcggcaaccgtcgtcgtcgtaaggttgatttcatcgctgctaaccacatcgaatatatcgactacaaagacactgatttattgaaacgttttatctcagaacgcggtaagattttacctcgtcgggtatctggtacaagtgctaaaaaccaacgtcgtttgacaattgcaatcaaacgcgcacggattatgggcttattaccattcgttacagaagactaatcagtcaaccaaaagacctgctaaacactgtttagcaggtctttttttgtgcgctttaataggggaacatgggattaaattacgggttcaaagcggtaattgtagggcaattgtgctaaaataaaagtagcattttttaagttttagtaaagaaccacatagactcaatgatagatgaacaagaatcagaatgggatctagaattaaggagtttacatgaaaaataagtttaaacaattaaaattaccacagtttttagatgatactcgcctgcggaccgttgccctgattttgttgggccttacagcggttagtttggtatttgctgcgatgttagattggctaattgctctaattttattcgtgctgctaatcgggacggtcattactgtgctatacgcgatcgaaacggtcactgagaatacagccaagtatgtctcggacttgtcgtaccgcattaagcgcggcgagcaagaggctttaattaagatgccaattgggattttattgtacaacgaatcaggtgagattcaatggacgaatccttatttacagcaatatttcggtaataaagaagttttaggcaaaaagattaagtctgtcgatccagagttggcagaattagtcgcacaaaatgaagatgctaatgaaacaaaaattgttcgttggggcgataatcaattccaaatcattatccaagaaagcattggggtggtttatcttctcgatattacacgctatgcggccattgaagatcgttatgaagatgagcaagtagccatcgggcaagtgttcttagataattatgatgaaatcactcagacaatggatgatcaatctgtttctaatctgaataactatgtcaccaacgagttatcacgctgggcgaatcagtttcagatgttcttgaagcgagttgatgatgatcatttctttgttttggcgtacgccaaatcattacacgccgctgaacaagagaagtttaagattttagatgaaattcgagaagaaacatccaaacaaaacttcccactaacgttgagtgttgggtttgcttatggggaatccgatttagccgttctagcaacaacttcacagagcaatttggatcttgccctcggtcgtggtggtgaccaagtcgttgtcaaagcgagtgaaggacaagcacgtttttatggtggtaagactaatccgatggaaaaacggacgcgggttcgtgcacggatgatttcacaagccttacaagaaatcttcaaacaagttgacgaagtctttgttatgggccatattcggccagatatggatgcattgggcgcctcatttgggattcgccggattgccgagatgaacggtaagaagtgctacgtggtcgttgaccaaaacaatattcatacagatattcaacgtcttttagaggaagttaaagcctaccctgaaattgcagtggaagtgttgtcgcctgaagaagcgctcgaaaaagcaacggccaatagtttattagtgatggtcgatcattctaaaccatccataacaatggcgcctaagttgtacgagaagcttgctcagcggacgattgtcatcgatcaccatcgtcgtggggaagagttcccagaaaacccaatgttggtttatatcgagccctacgcctcttcaacgtgtgagttagtgacggaaatgtttgaatatcaaccacaaaatgtcgctaatattaacaagttcgaagccacaacgatgttggctgggattacggttgatacgcagtcattttcaatgcgaactgggacgcgaacgtttgacgcagctagttatttacgttcagttggggctgatgcttcgatggttcaacacttgttaaaagaaaatgtcgataattatattcaaaagaatcatttaattgaaaccattgaaatggttgagccaaatatggcattatgtatgggtgaggacaaccgtacctacgatccggtcatcgcagcacaagcagcggataccttgctgtcattgtcagacattgaagcctcgtttgtcattgtgaaacgcccagatggcatgattgccatttcagcgcggagtctaggtgatgtgaatgtgcaagtgattatggagaaattaggtggcggtggtcatctttccaatgcggcaacgcagatggcagatacgactgtttccgaagccaaggcgaagttattaacggttttggcagagctatttgatccggaaacggacaaggaagcaacaaacgattaattagataaggtggtcagaacaatgaaagttattttcttagaagatgtacgcggtaaaggtaaaaaaggccaagtgaaagatgtgccagatggttacgcacaaaactttttaattaaaaatgggaaagcaaaacccgcaacatcagctgctatcagtgctttaaaaggccaacaacatgctgaagctaaaaatgcagctgctgaattagcggaagcaaaggttttaaaagccaaaattgaagacgataaaacaatcgttgaaatcaaatctaaagcgggcgaagacagtcgcttatttggttcaattccaagtaagcaaattgcccaagcattggctcaacaatatcagatcaatgttgataaacggaaaattgatttaccagaaccaatcaaagcgttgggttaccggaatgttgatgtacggattcaccctgatgtaacagctacgattcgtgtgcatatcgtaaccgaataataaaatgaatgattgaaaagaccgtgattagcaccactatcacggctttttttattgctgaccaatcggtgactgttgccagtcactggtattttgagtaaactagtgagtaattgaagtcgattaaccaaaggagtaaaaatggtgaataatgaactaattgaacaagtaccgccgcagaataatgaggcggaacaggccgttttaggggccgtctttattagtggcgatgcgctcgttgaagcaatggaatacgttactgccgacgatttttatcgtaaagcccaccgtttgatcttcgagacgatggttgaattaaacgaacggggtgaaggaatcgatgcggtgactttaaagagtgccctcgatgcgcagaaccaattggaagatatcggtggtattggttatttagctgagttggctgaggctgtaccaacggcagccaacgtagtttattatgccaagattgtctctgaaaaagcaatgctgcgccgtttaatccaaaccgctcaaaatattgtggcaaagggttacgcgcaagatgaagacgtcacggatattttagataccgctgaaaaggaaatcatggatgtttccgaacggcaaaataaggccgggttcaaatcaatttcagatgtcttaacgagttcaattgaacaaattgataagttatatcaaaatgaagaagacattacgggtctatcaacgggataccgcgatttagataagattactgcgggtttgcatgaagatgaactcattattttagcggcccggcccggggtggggaaaaccgcgtttgtcttaaacattgctcagaatatcgggacgaaaaccaatgagaatattgcaatttttagtttggaaatgggtgctgaacaactcgttaaccggatgttgtgtgcagaaggaagtattgacgccaaccatctaagaaccgggcaactcgacgaacttgaatggcagaatctaatcgtagccatggggagcctttcaaaagcgaatatctatattgatgatacgcccggcgtgaaaatggcggaaattcgggcgaaatgtcggcgcttagcgaaggaaaaagggggcgttggcttaatcgtcattgattacttgcaactaattgaaggttccggccaagaaaaccggcaacaagaagtctcggcgatttcacgtcaattaaagaaattggctaaagaattacgggtaccggtcattgcgctctctcaactctctcgtggggttgaacaacgacaagataaacgcccagtcctttcagatattcgtgaatcaggatcaatcgaacaagatgctgatatcgttgctttcttatatcgtgatgattactatcgcgatgaacctggggaagatggcgatgatttcggtggtggcaatccgccagcaccagcgccacagcagtcagatgatgcggacgttggagaagttgaagtgattatcgaaaaaaaccgtgcgggtgcacgagggacagtcaaattattatttgtcaaaacgtttaataagttctcatcaatttcgtatgcggaccaatagtaatgactatttttaataaatagtgaatattatcgtaaatgaaatacttaaaaaagccatcataattaaagtaaaaactttaattatgatgatttttttgatgggcatattaactgatattcgttaattagatgacaataatgggagggagaaatagaatgataacatcgttactttagttttatgagaatattctaaagatatttaaaaatttatttatatccaaaaatagttaatataatgcgaatctatagtgaatttcaattaatattaacattgttttccgtggctatggatggcattgttgtgttaagcactgaatgggcaactttttaccaaacacttacgcaaacatcgattacgattattgctaatgcggttgaactacctaagcaatacaaataccatagtcagtctaaacaaattatcacactggggcgcttaggcgaacgtaagggcacctacgatattctaaaattagcaggggtgattcaatcccgttttccggatattcaatttacgttgtatggtgatggtgaacaggggaaggtccagcaagaaatagaccgcctaaagttaaccaatgtgcgccttggtggctggttagctttggcggatcgcaataccgttattcaagaaagcctgttacacctattgccctcatatcaagaaggcttaccaagggcaattttagaaacgatggcttatggaattcccaatttagctacgaatgtcggggacattccacaagtaattgagaatcatgtgagcggggatttggtgacaccaggagatgacgctggcttagttcaacaactcagtgattttctaggtagtcagatgcgacgtgaaacatattcacgaaatgcccggcaaacgattaacgactgtttctcattgcaacagtattttagccggtggcaccagttttatcaaaggattatgaatgaaacggaggaggaatgatgaattctatagcgcaatcgactgataaattagagttgattaatttctatcatgagatggctcaaatttcagcaaacattagtcaaattttaaatgaagacggagttaccatcgaacaaattcgtattttacaaacattaaaacgctataaaggtattaataatagtaagattgcacaagtattaaaaacatctaccgcagcatcttcaaataaattacgtaaattagaggatcaggggtatatcagcaaacaatatggcaaacaggatgatcggcgaattgttgatatagcagtttctcccgttggagaatcaatttatcgtcgatttgagcaggcgtgtgaaacttacattaaaagtattactgaatcagataagaaaattagcatgccagaattaatgcagctgtttgaaatgacaaatagacttgctagaagtattcggacaactgaaattgaatagacaaaaaaagtgcccacaaacggttaaatttgtaggcactttttttgatttatttttgttcagcatgttttgctgcaattaatgaacgatagttgaatagtaagtttaagataacagcgctgagactgccgactactaagccgttgcctagaattgtgcgaacactcgttggtagtgattggagcaaggttggatgaattgctacccctaagcctaagccgattgaaacggcagcgactagtaagttgcggttatcatcaagatcgactttgtgtaacatcttaatgccttgaatcccaacagtgccgaacataacgaccatcgcgccccctaaaacagcgcttggaataatggttgcaacggccccaatcttaggtaataatcctaagatgattaagaagaatgctgagtagtaaactggttttttcgttttgataccggataattgaacaatcccaacattttgtgagaacgttgagtaagggaaggtgttgaacaatccccctaagatagcggcaatcccttcagcgcggaagccccgcttaagatcattgctagtaatgtcgcgcccaacgatttcaccaagggcgaagaagacaccgattgattcaatcatggtcgttaacgcagccaatgacattgaaacgattgatgaccattcaaaacgaggtgttccgaagtagaataattcaggtaatttgaaccaacttgcttgacctactggatctaaggacacaatcccaatcgcagctgcgattaaggtcccagcaataatcccaattaaaatggcgatttgttggatgaagccacgcccccagatactaaaaatcaggattagggcaatcgtttaaaaaccggtaattaagtttggtgtactcccaaacgacttagcagcaacatcgccaccgcctaagttttggaaagcaacgggaatcaatgtgaatccgattaatgtaatgagagaccctgtgacaactggtgggaagagccaacgtaaacgtgcaaacaagccagaaactaacaagatgaaaattccggcgccaataatactaccgtacataacgtcaattccgagttggctgttagtgccgatggcggctaacgggccaacgtactcaacagcacaacctaggacaaccggtaatgcaatcccggtcagtggggttcgttttaattgtaatagggtcgcaaccccgcacatgaaaatatcgactgaaacgaggtaagtcatttgagcggcattaaaatgtaatgcagccccgacaagtaatggaattaaaacatcgccagaatacattgctagaagatgttgtaagccgagaatcgctgctttaatgtggggaagcttttcatttggattaattggctgtgctgaatttgagtgtatatctgccacgagtgtccctccaagataatcgttaaaatttagttaacatttagtttagcacacgccaatagtgacttcaattagaaattaagtaaaaaacgaatataacattcttaaataatcgcgatagttcgcctttgtgatgatgcacaccaactgttcgatgacaaaagtgctttcttactgaatgattcgcttgaaaaaggcgataattgttcttaaattaccgagtattatgtttcacatgaaacgataatctgaaaactgggaagaatcttgtttttttagggtaagtacgttaaactaaaaggtatatgtgaaacaataatgttccacgaattaaacgcctactttaaagcatagttaaggagaaataatgacaccagcgggttttgcagcaacgttaaaaacatacaatattcaagtttcacaagcacaaatggatcagtttgaattgtatttcaatcggcttgtacaagtgaaccaacaagttaatttgacagccattacagaacaagaagcagtttatctcaagcacttcttcgattctgtcacaccaactttgtatcttgaaaaactacgcactgaaccccttacgatctgcgatattggtgcgggcgcgggttttccatcgttaccaatcaaaattttattcccgcaattgaagattacaattgttgattcattaaacaagcggattcacttcttagaagaattggtccgtgaattaggcttgtctgatgtgacgttggtccatgatcgagcagaactgttcagcaacccgaagagtccatatcgtgaacagtttgatattgtgactgcccgggccgttgcttcattaaatgtactggtagaattctgtttaccaactgttaaagttggtgggcagtttatcgcattaaaagcgagtcaaggtgaaacggaattggcagaagccaactatgcaatcgaaacacttggtggccaatttgcacaagacattgctttgacgctaccagaaacagatgatcaacgacatctaatcgtaattgataaggttgtaccgacacctgccaagtatccacggcgggctggtgtgccagttaaaaaaccgttaatggctaaggaggaaaaataatggcactctcattttttaataagaaaaaagacgataaaagtattaatcaagtgatcaaagtaccggtttcagcaattgtgcctaaccggttccaaccacgaaaagtatttaatgcggacaatatcgccgaattagcaagcacaatcgaacaacacggcttattgcaaccgattatcttacgtgaatatgaagatcaaaaatatgaaattattgcgggtgaacgccgttttagagcgattcaaaccctcaaatgggctgaattaccagcgattgttcaaactatggatgatcacgaaacagcttcaatggccttgattgaaaacttacaacgcgaagaattaaccgccgttgaagaagcacaagcttataaggacttaatgaagctgaacgacttcacacaagctagcttggcagaaaagatgggtaagagccaatcttttgttgctaataagttgcggctattgaaactctcacaacccgttcaagaagccatcatgaatcatgaaatttctgaacgacacggtcggagccttttacggttggatgaattcaagcaacaaatgattttacaccaaatcttggctgaacaattaacggttaaggatacggaagcgctggttaacaagacgttgaatcctgaaccagaatcaactgaagagacagttgatgcaaccgatgacagtttaaaagaagctaccacgaaggctaaaaaagcgaacgataaagcaaaaaaagcaattgcccatgatacacgcattgccgtcaacaccatcaaaaagtcggttcaaatggttgaacaaagcgggattgccgtcaaagccaccgaagaagaacaagatgatgtttatcggattacgatcgaaattccaaagcaataagggaggctcattatggcacacgttatttcaattgcaaatcaaaaaggtggcgttggtaaaacaacgaccacgattaatctaggcgcttgtttggcggatgctggcaatcacgtgttaatcattgattcagatgcacaagggaatgcgacaagcgggattggggttcaaaaatcccaagtcgaaaaagatatctatgatgtgttggtcgatgaattcccactaaaagaaacaattattaaaacatcacataagaacttagacattgttccagctacgattcaacttgcaggggcagagatcgagctaacatcacagatggcgcgtgaaatgcgcttgaagttagggttagaaccagtcttagccgattatgattacgttttgattgactgtccaccttcattagggcaactttcaatcaatgcctttacggcaagtaattcaatcatgattccagttcaaagtgaatattatgccttagaaggattgagccaattgttaaacaccgttcgtttggtgcaaaaacattttaacccaaacttagcgattgaaggcgtgttgttgacgatgtatgatgcgcggacgaatttaggggctcaagtgattgaagaagtgcgtaagtattttggtgatcgggtttacgacacgattgtgccacggaatacgcgcttagcagaagcacctagtcatggcgtatcaatcattgattatgatccaaaatcacggggcgctgaagtttaccaaaatttggcaaaggaagtgttagcagctcatggcaactagaaatggaaaaggattgggccgcggtttggatgctgtattttcagcgttcgaaggccctaataaaaaccgggcggatgaattagttgaagagattgcacttgatgatattcgtccaaatccctatcaaccgcggaagacatttgatgaagcggctttggctgaattagcagcgtcaattaagaagtcgggcgttttccaaccaatcattgttcgcaaaagtattaatggttacgaattaattgcgggtgaacgccgattccgtgcgtctaagttagctggtaaaacagcgataccagccatcacgcggcagtttgatgaatccgcaatgatggaaattgcggtcttggaaaacctgcaacgtgaagatttaacgccgttagaagaagcccaagcttacgatacactcttgaaaaagttaaacctgactcaagctgaagtatcagaacggttgggcaagagccgcccatacattgccaattacttgcgcttattgggtttacccaatgacgtgaagacgttattacaaaatggtgacctttcaatgggacaggcgcggacgttattatcattgaagaaaaaaagtcagattagtgcattagcgaaacgcacgattgatgaaggcttaacggtgcgacaactagagcagttaattaaccagatgaaccagattaaagctgcgaaagtgacgaagaccaagattaaatcaccctatattcaagcgagtgaaaatcaattggtcgataaatttgacaccaaggtcaatattgcgattaacagcaagggtcgcggaaagattgagattgattacagcacagtcgatgatttaaaccggattcttgcattgctagatgtgaatatcgattaaagtgaggagtcgagctagatgtatacattaggcgatcttgttcagatgaaaaaacaacatgcctgtggcaccaatcgctttgaagtggtgcgcttggggatggatattcgaattaagtgcatggggtgcggccacgccgtcttattaccgcgccgtgaattcgaaaagaaacttaagaagaatttggtgcctgcagcagaagtcgttgttgcggatgaaccccactatcaagagatgcaacaaggtcccaaccaaactaatttttaaagtaaaggaaagtgtaaaaaactatgtcattaaccgcaggaattgtaggattacccaacgtcggaaaatcaacgttatttaacgccatcacgaaagcaggcgccgaaatggcgaactacccatttgccacaatcgaccctaacgtcggcatggttgaagtccctgacaagcgtttagaccggattcaagaaattatcccggctaaaaagatcgtgccaacgacttttgaatttacggatattgctgggatcgttaaaggggctagcaaaggtgaagggcttgggaacaagttcttggaaaatattcgtcaagtcgatgcgattgtgcatgttgtgcgcgcctttgacgacgataatattacctctgttaccggaactgttgacccgttagacgacatcgatacaattaaccttgaattgagcttagctgatttagaaagtgttacgaagcgttatgcgcgtgttgaaaagattgcgcggacgaaagacaaagacgccttagccgaattcgaagtgcttaaaaagattaagcctgttcttgaagaaggcggctcagtacgttcaatcgaatttaatgaagatgaagcgaagttagttaaaggcttcttcttattaacatcaaaaccggttttatatgttgcaaatattgctgaagatgccatggctgatcctgatagtgtggattatgttaaacaaattcaagcgtccgcagctaaagaaggcgccgaagtaattgccatctcagcaagaactgaagaagaaatcgcctcattagatgatgccgataaggctgaatttttggaagccgaaggggtgactgaatcagggttggataaattgattcgtgcttcatatcatctactaggcttagcaacattctttaccgctggtggaaaagaaacccgggcatggactttccgtcaaggcatgaaggccccacaaaccgccggtgtcattcattccgactttgaacgcggatttatccgggcagaaacagtttcttttgctgatttagatcaatacggttcaatgcaagctgttaaagaagctggccgtttacgtttagaaggtaaagaatacatggtcgaagatggcgacatcatcgaatttagatttaacgtttaatgataattgaggaggaagacaattggctaagaacgaacaaccagcagtaaccccagaaccagttgatattgaagggttagaagcaaaactcagtaagaaaaatgcggactatttatttaagttcaaacgcgcattaaatgccgaacaagtgccagcagaacgccaaactgaaatcttggcagaaatgttaccagaaatggtagcagaacaacataagggcaagcctgcaacacaagtatatggtccagtgacaaccaagattgatcaattgttgcacgcgccaaaacgtcctaagcaaacatcacttcaactccaaatgcttgataacggcttaatctttttaattatgtacctagcctttaacggaattgcggcttatttctcaacgaaggggtcagcaactagcattgggattacatcaattgtcattacggctgcgcttgcagggatcatcatgacttatccaatgcgctatacgcaaatgccaaaagaacaacggccaccattttggaagatggcattggttgtaatcggcttaacactagcctttgttgcggcatacggtgtgacaatcttgattccaagtttcttgaatccagtcttgccaccacttgttcaaatcgtaattgcagcactcttaatcggcgtgcggatttatatcaaacgccgttttaagattacaggttcattcttcggttaatattacccgggaaataaatggtaattgaggaggatttgagatgattagcactgaagaacggcaaattggggcagtcagtacgttgattgtggccccaagtggtcaagaaaaagcggtattaccaactgtctttgtatatcatggttggacgcaccgtaaagagtcagaattaatggtcgcccactttttagccaaggctggttttcgcgtggtcttaccagatgcgaagtatcatggtaaacgacatggtagtcagctcttttctgagttaatgtttgaattttgggatattgtgatgcagtcggtcaccgagtttggtgaactggttgcaacactgagtgctgaaggcttagttgatcctgaacggattggtgttacagggacttcgatgggtggcattacaaccgatgcgattctcacccgatatccgaatgtcaaaattggcgttgataagattggcgcaccaatgcctgtcgcacttgctaaatggcaggttagtcaattaccaacggccttacaaaccaagtatcaagatgcgattgaagataccttagcacggttagcggcgtatgacttatcaatgcacgttgatcacttggcaggtcgtccattgcatttctatcatggaactgctgatacgatggtgccatatcaattcacggcagattttatgaccgaaattcaggcgcaaccaagttcagccaccgcattagtgacattgacgacggaagaaaatgggcaacataaagtatcagacgatgcccagctcaaaaccgttgaactgatgcaacagtacctactttaaaaatgagaaaagccgccagaacgtaaattgttctaattaaaaaacctcaatttttaaggtaatcatttttgattttaatttgaagtaacaatattcgaagagttatcatttttcttggtcatttctcggattttagtggagttagaagtttcaagtggtccgctctgctatgattctctcatgtaaacatcatctttgtatattgaatttctttcgatatctgataaaggtcgtccgtttaatccctgtattacgggcaacatctacatcactcatacccatttgataaagtttaaaagcatgtcgcaagcggggatcgtctttggcatattgaggcttccgaccatgatatttaccctgctgcttagccagggcaataccttgttgctgccgctcaataatccgcttacgttcactttccgcctggtacttatacaattcaatgatgaggttagtcataagttgacgtaaattagggtcagtaattccagtcatggacggcaaatttaacacatctagggtggcacccttattttgaatggtgttcatgatcttagttaaatccaggttatttctgcctaagcgatctaattcagtgaccattacaatatcaccctcacgaatataggccagcattttttgtagttctggccgattagtgttagccccacttaatttatccgtaaataatttatcaacgtcttttaaagccgctaactgtcgatctaaatgttgctccttggaactcacacgtgcataaccgattttagccattttcaattctccttttggacagttctaatgaacacttgtaattcctagtatagcaaagaaataaaaaagaccattagggtataccctattggtcgcttttgatccattatcaatggctttttaaattagggcctagtacttttggaatggaaatactttccaacaccaaaaattctagacccaaataattttacaatctaccatggctaaaatgttaagcatgcgcgatttcgactactccaagatcggcaacatctttgaactagacgaagtcacccctaaaatggcaactgaagaacgccttgatgattctggcaacaaaatcatgggcaatgatggtacaccgcggaaattcaacacggatgaaattgtcggctataagtattccgtcacgattctggaaggtgaacatcgtaagaagtccactcagatcaccgttgctggtctcgactgtccaatcaacaacgcggaaatcatgaaacgtaacagcgtgaaatgccgctttaccggtttagaaccaagcatggtcggcaacccaatctactacaaggctgaaaagattgaattagttgccccgcaggccaaatagaaacactctgggctacccaatctaaacgggtagtcctttttatcgcaattctacttggtcagttgccgataacgttcaaacagcatggcgacggtatcactctcggtggtgcctttaattgtcagcccatatgtccgcataacggctcgatcattatcttggtgggctttgcgcagttcaggaactgtcgccaacggatcatagagatcagctaagctactatccgggtaaagtttacgggcatcgagaatcccctgggctgtttgttcaatctgcgccttttgcttatcatcaacttctggccacggaaaatttgcatagacggttggcgagtaactgtaatcgctcttcattctaccagcaaccgcacgcatccacgccatatgcacattagaagtcatcacaccgaacatatacagactggcattcggaacgagatacagcttgttgctggcaataaccgctggagacatccaccccatcggcacataacgtcggtgttcgctcgaaacctcagggaccgctagatagtttgaatccggttgacgaatttcagtgaataacatgggcatttccgccaatgctttaactgacggtgtaggacttttcaatcttgcttcggtgacggccgctaaccgttccataattggtggaacagaacgaaattgacttggtgatacaccctttaaccaaatgcagtaccgctcaacattattgataaagtctctggagccaacataacgtcgtatataactttctgtctgcgggtactgcttaattaacgccgcccgttcctttggagaaagaatcaagttacccccatcaactggtttactaccctgcgacatcattggaaactgagaaccagacacgctaatctttcgccgaggttgtgggtaaacattcgctccctcagtaaggtacgcattgatgtggtcaaccagcttcatctggccgccttcaaacagacgcttcttctccttgcgcgggtagccggtgaacccaatgataaccacatgaacttgcgccttctccttggcttcactgctccagcggaatgtccgataggcgaattgaatttcaatgcccttctcgaatagttttggccaaagcgttggcgcttgctcaccttgcgtgatcgagttagttgaaacaaaggcgacctcggtcgtcttaccttgaatgaagtcagccgctttgttgtaccacgccgccacataatccagcttgccatacttggtaaaatcatggaaagcaatatccatgtccgctgcttgcgcgcgtgtccgcttttcgtgaccataaaatggtggattaccaatgatgtaagtaattctctcgccgccgactaccgtttcccaatcgagacggatggcattgccctctgtgatgttggtgtacgtcttcaatggcaaaaagtccatattcgcgtaaacaatcgccgccgtttcttccatcatctgcgattcagcaatccacagcgctgtcttgccgacggacaccgcaaagtcattgatttcaataccataaaactgttgaatggacaccttgaccaaatcgtcatcaactgccaacatgctttcattcccgtaaatcaagctgataacctggttttcgagcttccgcaatgacaaataggtttcagtcagaaagttacctgacccacacgctggatcaaagaaacgcaacttaccgagccgggcttgaaaatctgtcgcgcgctgaatcatggtcttacgttgcttaatttgcttgatttcagtcagctcatttcggagaccgtctaggaacattggatcaatgactttatgaatatttgcaatcgaggtatagtgcatgccaccttcacgtcgcgtgtctgggttcaaggtactctcaaacaccgcaccaaaaattgttgggctgatctcagaccagtcaaactccttgctggcttgatctagaatcaaagcgcgcaacgaatcggtgaattgtggaatctcaacttcctcattagtaaacattccgccattcacatacggaaactcagccaacttttcttccagatatgggtcgcgtttatcgattggcgtatccagcacacgaaacaggtctatcaaggccgtacgcagatgccgcgtctcaaattcattgagatagtcgtgaaacataccatgacggccaaaaatgccagcatcttcagcgtacaagcaaaacactagacgtacagacaactcgttaatactacgctgactgctggcattagtaggatcacgatactgcgtgaacagttcatcgtaaatcttgccgaccaactcaccagcttgcattgaaacttccatctctttgtcgagatgcggattcaactgatcgacgataaagtccaaacggtaatactcagtcggtaagtccttaagctggatcactgccggctcgccattaggttgctccatatcatacacgaagaactgggtaaagttgctcgtgataatccagcgcggccgcttagagtacggtaaattggcggaatatcgttttgcttgctcaaatggagacagcaaactgccgtcagactgccgtatgccgtcaaacaagctcttatttcggcctttctgttcaattaacaccttggttgtgtcaatgaaaccgtcaataaagctggtgtgatccagcattactcggtcttcaaaactgatgtactcaccaggattaggaatatcataggcagtctccagcaagtccaaccagaaggtctgactatcctgtcgttcattaccacgatcttgccaacgcttgacaaaggccgtggcggctcgtttttgatctgcttccttcatgaaacagcctcgattcgtcagtattatgtttcaagtatcacgcatcaatcatataaagaaaagcgccagtctcgaagttccgaaaactgacgctcacaaacatggggacatcgctatattctaagtgaattcaaccttgagcttctttcccagtgcaaaggcaatcttgctcatggtatcaaagctagtgttctggccatgctcgatgcgcgcaatcgttgattgcggcacatctgcccgctcggctagttcccgttgggtcaaaccggcgcgttcgcgctcgctcatcaacgccactgcgctctcaagtttggcagattcggcatcaaagcctgccttgaattcagggtccttaagttgttcagcgagataatcgtcaaaagaaatgttctttgccatgttacttacctcccaaattatcgtagtattctgtcctgagttctttggcatgattaagttcagacaccggcgtcttctgggtcttcttcgtgaagccatgcgtaatcacataacgcggaccttcaacgtgaaagtacaagccccgctggatattcgatcctgttgtccgaagctcaaagatgccatctgatatttttctgatccacatttggcgcgccgccacttgcaaaccaaatttctgtgtcttggcaatgacggtgaccagcttctgcttttccactggcttcaaactatctaagaattcttggaattcattgtgtccacttggacgcgtgtaaaactcgaacttaggattttccatgtgtttagtatacacctagcgagccacagtatcaatatatgctatcagattctaaaatccaaatttcaaaacttcttagtctctaaatgagtgaattaaaagaccaccacgttcgggaacgtttgttcgaaaatcgaccataaaagccttctactctgctataatacgtatgaatcaataaaaattatatagataaggcggaacacacatgaagaaaagcctgccacgaaaaatcatctactttgatgaaacctccgctgtagatttattacaggttcgtcaaaaaggacatctgacgagaaccgaggaaacaattcgatctatgactgggaaaattggcgcagatgctgacataaaagcacaactagacgaagatgtcggagtcaataaactggtgagtcatatctctggcttatccgccggcatcaactcaatgatgggagcaaatggatctctcaacggaagtaaaattgccagaaccgtcattgagaattctttgctttatgatttcttagagtccgcagaatcaaaacggggaacgccattattagatattaaggaagattacgcactctcaattccgaaggattcaatgacttacttcgcaactatagcgcccctaacagagatgatggagggacatcaacagctcgacaatccagatattaccatggcaatttcaaaaatgaacagtggcatccgaaactctaaaggttactacgaagtggtcggagaaaaaactgattcaaaatttggtaaatccatcaccactcaaaaggtatttcgttttaacattgatgcttttaagaacaattatcgtattcaggatttgcctaaaatgaacttagttctgtatgctattcacgtcggtacaacaaagctatcccaactcgattttgaaacagagttcaatcttgacagtcagcagtccgaagtcggatttagcggcttagccaagcaggctcaatcccatcaggatgctgattctaacgacgaaaaatcgcttgatgttttcgatgtcgttttagcgggggttcgctaatggcaaatattcaactattctacggatcgagcaaagatttccgctccctacttaatcaaaatcaagtagaggacaattacacaccatttatggagctgattcgtcaatataatgtaacggtccgcgccaacgatactatgggcaacaaagatgccgaatttagccgcgataaaattggtaatgtggtaatttttgctgatgactttgcatcggtcacagaacacgtaatctcaaatttctcgaatattgtactactaggccacgacatcgaaaacttgtatattcagaatcctccgaaacgagttgaatactccatcagatccaaatttgatgaggatgagattgttgaagtaacgtcgccatatttttctccaagtacgaccgaggtcacaaaactttactctcagctactaaccggaaaagttattggacaaaacaatgctaaacacgcatcgtgcgtaggattgtacaaagcggcataccatcaccagaaaaagcccactgtcatgatgttctacggaccctctggcgtaggtaaaactgaattagctaagaatattagcaacttctaccatggtaagttaacacgaattcagttttcaatgatgcaaaccgaagaagccttcaaatatgttttcggtgatgaacatgctcggccatccatggctagggacttactatcgcgcgaatcaaacatcgtcctaatcgatgaattcgacaaggtgtcccctagcttatataacgtattttatcaaatgtttgatgagggtattttcgaggacatcaattacaaagtggatgtatctagttgcatattcatcctaacgtctaatttcaacgatgaggaaactattgcatccacggtgggccttccaatatattcaagaattgatcaaaagattaaatttgaaaaactaaccaaggaggaaatctccacggtcatctcaaatgccttcaagcgaattctgtcagaactcacccctgaggatcagaaatttattagcgcctcaaaattagaagaacactatcaagaaaatttgcagattttttcaaacgttcgcatgcttgattcatttatcgaaaatgacgtatataccatgttgctcgagcaacaaataacagttaactcaagttcagatgaatagtagtgcccgatcccacaaaaaggggtctacacgttcagtgttgattatttctcaacaccagaaagtgtagacccatttttatacaaacaaaatgcggtgttgccaccccattctatttgactgtcaatttgcccactataacattcagttttcacacctttgattttgtagcgtgaatgatcgctgattgtcataatggtttttctattttgcttctaatacctttaatcgcttgaaaacattgacaaaatattttgtttcgtcaatcagcagcatggtcgtcatcaaggtatcttgaccatggaccataatgaacgtgacgtccatgtcagctccgccggcttcttcggccaatatctttgtttgtgagttgtgcgcgtcatcaatagacttctgcgcatctttcaactgcttctcggcttcatcaaattcaccgttttgtgccgcggtcaatgctttcatgacggctgtcttcgcatcgccggcatacgcaacaagttcaaagccagccatcgatatttcttcttttgttgtcatgattctctccctctatcgtttagcgtgaactcacttgatcaaccgcatcagtactaggtatttcatgcgtcgacgttagtttcttaaaccagtatgcactttttttcggataacgtttttgcgttttgaaatcgacgaagaacaaaccatatcgtttgctatagccgtttgtccaagagaacatgtcttgcaaggaccatatgaagtaaccgcatacattggcaccatccgccattgcttcttgaatcgccttcaaatgtaacgcaacatattcaatccgtttctgatcatcaatgatacttccgtcctcaggcaacgattcttttagtccagtaccattttcagtgacgtacattttcttaacgagtggataattgtttttaattcgcatcaactggtcgtacatgcccttaggataaatcggccagtcccaatcagttgttggaataccgggacgaacctgttcctcgccaataccacgtagccgagtgattgatgagccttttttacctgtgccgttgtgtaccgtttcagaagggccatcatatgctttaacgaatttactgaaataataattgacgccgacaaagtctaactgtgccgctgcctgagctaatactttttcatccgcttcagtgattgtaataggcgcttgcttgttggcatctaaaatttcattcatcagatcaagtacttcatctgaataacggccagccagcgtaccatctaggaacaagtaattatccaatgtatcttgtttcttggcggcgtgaatgtcagcagcgttgccttcttcaaacggataaacagtttgaagcgcgtggacaataccgatttcgccaggaagtttcatttccttatatgcattgacaacccgtgcatgagcaatgttttcgttatgctcggactgaaaagttttatggaaattatatttttcacctggtgggaatgttcctgtcgtccactgctgaacagccatggacgttggttcgttaatggtgatccagtaatgaatctcagggaattccttgaaacaaaacttggcgtaatcaacaaatttatcgatgttttcagtatttagccaatcgcctgactcattaatcggtaacggcgagtcgaaatgatgcaaggtgacgaatggttcgacgccgtcttttttacattctgcaaacagccgatgatagaaggccacgccacgcggttcgaccttgcctgagccggttggaaatattcgtgaccaagcaattgagacgcgaatcgcattcaatccgaactgtttcgaaagccgtaagtcttcggggtattcatgataaaaatcacaagccggatccgggctaaaggtaccttgcttctctaaaaacggatcccagagaatcggcccgcgaccatcttcatgcgttgcgccctcgacttgatacgccgcggttgcaccgccaaagtaaaaatctttaggaaatttcacgttggtcctcctcgtttatttagcgtttgcctcaacaaacttgagtgctttatcgccatcttgggttaactgaatgtactcacggccggttgtcgtaaccatcgtgacaccgtacttatcagtaatcttctttaaattccctttttggctatccatttgaggcgccagaatgactaaatccatgtcctcaattagatccatgtcctgaccataagcacgagcggttgcttgtaagggaatctttcgctcctcagccagtttatttaacgcgttggctaggatgccgctcgtaccgccgccagcacacaacactaacacgttggtcggtttacttaatccattagttttcgattcatcaattgtcacatcggacccgccggccagggctgccgctggttcaccaatggcgtctgtcgcagcctgaaccacttgtgtcccatttccagcaacactagctgcggcttcttgcgccgccgtttcagcttcttctgcaaccaactgcaaatcgtaaacttttaggaatggtagataaagcgcaatatcaacaactaacatgagcgcaaccagaacgaacgacaatggtgcaaaaccagttgctactggtagtccgattggtccggggagtgtccacggcatcgtgtacatgattgaattcatacccaaagttgtgacaaagaacttatacatccaaatgttaagaattggcgttaggatgaaaggtaggaaaaagattgggttcatgataatcggtgtcccaaacaggaccggctcgttaaccgagaatgtcccaggaataaacgccgctttaccagtagcctttaattcttttgaccgagcgaagaggagcatgagataagctagaacaaaggtcgaaccagtgcctccaaagttcataacaaagtccatcgtgttataggctaaaacatgacttgcatgctgtccggcttgatatagctgtaagttggcagccgtgttggcaatcataattggcgtaacggctggtgaaacaatggacggaccctgcacaccgcagaaccagaagaatgccatcgcaccggcaatcaatgccaagccaagatatgaatcgctggctttgaacaatggggaaagaacctgaatgatgaacttgggaagattggtaccggtaaatgtcttaaatccgatggtaactgcccagaacgtggtcaccgaggcagccattggaatgacatctttaaaggtctgtgaaatattgccaggtacttgtggtggcaatttgatggtgatgttgtttttaatgcaaacatagtagatattcgggatgattaggccaaccagatatgctgcaatcagcccttgagtccccatataagtcatatcggaacctgtcttaagtggcaaagccgccaaaataaagaatgaaatcattgcggccataataactgaaatcgggttaatttgatttgtcttcggtaactgaatatttttggtgtcagttaagtttttagccgtcgtaccagccacaaacagtgctaacagacccatggagtagttataagcaagcatgaggttgttctcgacaccttttggccagaagaacccccaagcatttggtacatacgcgatcatgagaaagacactagagaacaagatgatcggcattgcagcaatgaagccgtcacggattgcagaaatgtatgcgtttgcagcaatcttttcaaaaaccggtcgcaatttctcaatgcgcttctggaatttgtccatcacgataaaacccctcgattcatataatttttttagtttgcaatgattacgctttcattgactgtcgttattatagtctctaggaaaatgaatgtcaacgattttttactaaaatattttctatataagccaatttatcggagttctttgtttatttttttgagtattcaggtaaatataattcgttttcctaaaggggtaacacggctttaagatttgaatcagcaaatctttagtttttcattttttccaaaaaaaatagccagactgtccgtctgactaatcctgtttatttaaaaataaaatgaccttacatgatggtcaatcgctactttcacgataagtgactgatgtgccgaccgtcagacagattgctggcagatcttctttagccgttaacagctgtgtcattaagccaatcccttgctgaaccatcaaatcggtatagacacgaatggaactcaaagcaggtaaagttgcagctgccgttgcggaatcattgaagctgacaatagccacccgttgcggaaccggaatgtgatgttcattgagataacgaaggacgcccacagccaatgtgtcacttgctacaaaaagagcggttggaaattcgtcatttagtttttcaaaggctcgcgccgtcatctgataccctttttcaggcgtgaccgatccttgaaaaacattttgcgaacgatacaactgtttagatttcaaaaagcgtcgaaaagctcccaaacgtgggtcatagattttttcttgatcgtcactcgtgcgaccgttaccaaccatgatgccaatattatcgtgcccgtgatcaataaaggtttctagcacactctcaattgaaaactcattgtcagttacgacagaggtaatgccgtcgcgaagcgcattttcaccaacaatgacaactttggggttgatttgtttcaactcttcgcgctgtttatggctaaaatgccccactgcaatcacggcatcgcactcctgtaagctagaccaagattcaccatagtaaaaagtcgattttgtgaagttagctgcacttaaagcgtcctcaatcatgacgcgtagtgacaggtagtaggcatttttcacctcttgtacctgtgtaaaccacgtgacaaccccaatccgaccttttttggacttaggagactttttcttataattaacgtcttccgccgcggaaaaaacccggcgttttgtttcttcagtgacagctaatgtcgcatcatagttcagtacgcgagaaaccgttgataatgaaactttagctcgttctgcaatttcttttaaacttgccatacctgccctcctctcaatattccttgtctttcgtcttacattttattttacacatttcgatcctcatatcgcccatgaataattgtcacaaacaaatcgctgccgtcttttaaaaatagccgcacatcattttatgaatgccattaccttaccacaaatcaagcaaataatatggatctggtgcaaacagtctgagagatgaccatctaaccagctattgatcctctgttgaaggttatacagctaacaatgcttctaactcgtccacgactgagaacccgatgagacttaactctcgtcgggttcttttgcgtattgcgtgaacaatttccacaccgctcaacgttgcactagcggttcgaatgctttgaaagcttgctgagcggacacgatgacgtttaatgaatcggtggtcctgttcaatcaaattatttcgatatttggaacattggtgggctgatttgctcaaatagtcttgctttatcaggtgcttcactgctttcagtgttgcccgatattgatcagtgactaatcgatcaggccgaccattggtcgtcaagagacgcttcaaaaagtgataggatgcggtataatcgcggtgttttcgtagctcaaaatccatggtcaaaccgttactgtcaatagcgcgatacaaataggcccaacggcctttaactcgaatataggtctcatcgattcgccaacttttagcgtgagctgtttgatgccgacgccatagagccttaaagatggggccatagtgatgaacccaacgcatgaccgtggtgtgatgaacagtgataccccgatcccgaagcaattcaacgatgtcacgatagctgagactgaatctgaaatagtagccaacggctactaagatgatgtccttttgaaagtggcgtcccttaaagtgattcatgcgcgcaatccctcgtttcttggcacccagtatactaaaatcaagtcagcgaggaaaatttgcaccagaaccactttttcttggttgtttttataactggctttggccttgcgatagttttttacttgttggttaaattcttttctttcataccgcttgctattgatcccctcatgttgagttggtgtatcatctattccctgctcgataaatgatttttcactgatccgatccggaatatttttttgctctaaaacttgattgacactagccgcccaattgtgccgccattcagtaattttttcttttttatcccaatcaactagccacacctttcttgatcttggaaaacgactatttcctgtataagtcttgttcccattttcatctaatatattttcccttttacttttcaatccccatgttccgtctggattaaatggacgattagttagcataacatgagcgtgcggattatatgggtgatctctatgaattgctacgtcggcaaccataccctcatcaacaaaattttcttgtacatattttgtcaataattctttctgttcgtcttcacttaattcaactggtaaagccacgttaaactcttttgcatagcgtgaatttgctcgccgatcttttctttcgacttcattccataatttctctctatcactcgcccattctggcgcattctttggtgtcaaaataaagctttctggcatgactgaccgagcataaaaatagcttcgaccttctttttgatcgaataacttttcaccacttctataacttgctccagcaatggcactacgtcctttaccagcactaatattttgaaaactcatgtgaaaaattgccatgtcggtcaccacctttctttaggtttatgggtttgcttttgttgtcgccaacggcgacttctgatacaagggtttagcacaataatacaaccaactttagttgttgtgtgtaagtgcgcattgaccttatttcactcggtctgctgattctcctgaatttacttttagtatatgccttccgcttcgctatttcaacttttatactttgacttaacgtttttcttatgatatggtgtccatgattattttcaaatatgattggagggataatcatgtcgcaaagtaacttagaaaaacaagaagctaaattaaaagcccttaaccaaaaaatcaaggacgaaaaaaataagattgaacaacgattaggtaaacaaattattagtcaagcaaatttagattatgctaatttgtctaacgatcagattaagcttttagctaagcaattttctgaatttttaaaggtaaagtccgtagatcattagccatacgagatggggaaattccatgtctaatcaatatgaaaaactagtcgagcagcaagcgcgtttaaaacaaaaaattgatcgggaagattttaaattacgacaatctaaatactatgaaaatcggcaagtccgcaaagcccgttctcgccgattaattcaaaaaggggctttattagaaaagtactttcaagctaataacctctcggtcgaacaaaccgaagaacttttaaaaacatttgctgactatgttaacgcccataaaccggataaattaaaaaacgatcaacctaataactaggccgatcgtttttattttcaggattgttttttggcttaatttctggattgtgtttagcaaaatcttttaattgttcttggattcttttaccaatttcgtcttcgactgatttaagctctaagtttgctctaatttgtaatccttgaatgccattgtcatatgtccaccgtttaattttagccatgtcattagttcgataataattggcaattagttcgttccattgatcccacttatctaacggcacattgattaagcctgcaccaccgtcaatcataattttattagcacttaaagtcgccgtccttttgttcccgtcccaaaagatttgttggcgcatattatgatacataacagtcaatgctttatcagtggtcgttgtttgcggatcagccaaaattttttgtaaaaaggattgttcttgtttttcgttaattaagggtggttcaaaaaagtcttcactgcctaaatcaactcctccttttccttgccgtaattctcctggtactaaggcgtcttccgcggccacaatcttgttaatttgtttttccatggttaacgttaaggaggaattttgatcagtgatatattgccacccacgctttaagttaacaattgtcaaaatatcttcaacaggaacgcctgccacactcatgccgtccataatggtttgtgtttgcggcaaagtggtatttacgccttcaaagcgggcactagtgtgtactagcttggtaaaatttgttcgagcaaaccgtttgttttctgcaactgtaaattgatacttgtccatatatgcttgtgtcttagtcatattttgtgcctccttttcattccaaccactgattctttgactcatccatgttaaatcacgaaatgcttttcgttgataatttttttcttgccgtttatctaagaggtaagtgtgtaacgcgtcaaacaacttgcgcttatcagggtctggattatgtgccgcttgttcccaaatgccttaaatattgactgtccaggggtcagccaacaattgctctattttttcgacttctttgcttggtttggtcatttaaaaagctcccttcactttcacttagttcagtcatcacctgttcaaccacttaaggcacctatttttgcttctaaacgattttaaagcagttttaatataattatgcatgcaacacttaaaacggcttaaatgagtccatatgacgtttaatttcaagaacgctcattgtcagtgttctgttcttcggggtgtttggccgcatattctctagccgcttgtttattccaccaaacgccaaataggttttgcatggtgccgtacaagtagttttccacgttcttgatatgcttttcattgcttcttagggcgttaaagtagcgtcttaaggctttagtcatcaaaggttttagttcttcgtcgtaaagcgggattatgacgccaatatcttgatgatccttttcaactcggtacttagcatttaagataatgccgatgaagcgccgcatttgttgtggggtacggcaccagaagctaagtaatttcacggcttcgggttctaagaaaacgggtaagccactgtcttcatcagttaagaagtcattagcatgatttatgagatcctggttttgtttttgaatttctgctggtgagaaattggctgtggaaaagtccaacttttgagtatctatattgcatctgtttttgtctctttctttaggttctctatatagattaagtccattttttgaacttccgctcgtagcaagggtttgagagctttttttaccaaattcgccgcgtaaatagacatcggttgctttcacatcgagcttggacagatataagcgattcggttcatttttcttagttttcgggttaaagcccatttgtttctgaacgagtaatccgattgattccaactctgtttttgttttgatggcttttccctttgagcaattaaacaagtccattagttcttggttggtaaagataaagtaaacatgaccctcactatcaacccagttattacgcaaagaatactctaaacggtctttgaggaccatataagctaatttagcgccattgcttaaatgcttgtattactcgccatacattaatacctaccattaagtttttttaattgcaatataaattttaagaatttattttgcaattcacgaactaagtgacaaatgtggcgtgaaaatatagcgtattcatgctactacctccaatatttttgtaaatttaaactaaatgccgattaacgacaaattttaataaattaacaaatcatacaatttattaaccgctaacaattatgaatttagttaattaaatttttaacatgaaaataaagcttcttatgtttttcaaacgttgtatatacggtatttaaccctttttaacgaactcttgttcgctttgttcgtgtacatcatgacatagcagacaattaagttgcaacatgaaatttaataaaaattaccctgggtactaataattagcctgatagcgccttaaaagttactcccaggtgatagttgccccactagttttatatgctgttatggcacgtttactgcctagttgctcaaactgatcaaacatagtgctaaatacatagctatttaaatcctgtattgcacccaaccgtacgtgttggacaattcgcattaaggcatcataaacaggttggtcgatgtcttcgtcttgtaaatcaaacaagctgctttgtatctgatgactgtttaatgcttgttttttggcacgtagaattgttttttgaacagtacaaaacaattcaaaatctccgtttgataagagttttaaggctaaaagttgttgtttagaaaagatattgtcgttttctaattgcacttcaaacagcgcagcgtcttgtagctgcttgatattttgaggactatccgttagagtatctgtttttttagtatctgtatttaaggttttaagatattcagtattattaatatcagtatcactagttaccgtttttcggtaatctagattactgtttttcagcaatctagatttatcaagggtttcaggctgtccatcattcatagatgttggtaaatcaatgtttacaacttcttctgcgagtggattttcagctgtttcaagttgatcgatgccataaatatcgttatcagtaatttccggtccaagtaaatacatacgatttgctttaccttgtcccatacgtttcataactaataattgggcctcagttaattcctttttgattgaagtgatttttgagtgtccgcaaccaagaatctgctctagttgttcgccagtgtaaataaaataaatattgccggctttatcgaaccaatggtttttgattgaaagttggaggcggtcagaaagaatggcgaaagcaagttttgcttcagcactcaattttttatatttgtcgtttgtcataaagaccttaggaacttggaagaatttaagtgcgtattcccgcttaatgttgtaatagttcagttgattatccatgttagatctccttatcaattaaaaagagcgaacccgcatttgcgagtccgctctagtgtttttagagtaggcaaatgcgagcctggttaaaccagaatctcttttgaaaagccgcacgacctacttttatgtatactcaaacaagcctttttatattgctattttgaacaaaatagcctataattaaagacatagtttagaagaaattacagacaaataacttcttaaagttggtcatcacgaattaccgttcgtgatggctttttatttactatttgaaaataacatttatatcgaagtatagcaagggacaactataattaaagtataagttatactcggttttactagatataacttatactttaaatggattaaatgtataaggtataagtttttggaattggttaatttgttgctgtgaaagtgatattcaacaaattaaaaggtataagttataccctttctgctttagagcgtgtataacttatacctttttcgcttgtgtataaatataatttatttttttattttctcaaattcagcagcaatttctgattttaagtgttcgcttttagccataccaagtctcgtatctatataggaatcagctaaagtgttaacaagtttatcaaatgatattcttttagttgtagtagcaaattctgtcatataatcttgcaatagagataatttactttctaaagctggtgatattttcttaggacgtgttacctggtatctgtcatcttttatttcaacagggcgaccttgcttttttgatcctttttctaacgctggagaagaaggtgttgttgttttagatgttgcttttctactattcattgttgtaccggtaccaaatgaatattcgccggcaatttctactgattgaacttttgattgtggcttatttagtaatcgtgtgaattttttttcttctgtattgtcagtgttaaattgtcttacaaccatttagctcactccttataatgatttcaaatattgatctctactttcaatctctccaagaatttcattgaatccgttatgagctttgaagtcccattgatcaaagttaccatttttatatgtttttaaatcaataccttctcttgagtatcttttaagtcgtttttggtgcgtaatgatagtatcagcaacgacatctccatacgcttctttggcctcattgtaaatttcctgatcaagattatcatcaggttcaaccatacaagcaacaatagcaataacttgaagattaatattaaattgttcaaccataaagttttgatagccaatatatttattcacaccatcaaaggattcatcttgggtttgaaaagcaattatgctgtaatcagatgcggccatagcgttatcggaaaattctgaaatagtcggtggaacatcaatgaaaatagtatcatattgtttttttaaatcattaattagatttgcaataaaacgtacttgttcttgctcgtcgtttgaatacgtgcgaataaatgcaggaaagtttctaaatgcagtgtcgcagccaatcatgtcgagattctctcgaatattatagatacattggtccagtgagactgctctttcctctggtattaaagtatatataatagcgcgtggatctgcttctagttgttgaatacctttatctggagactcttgtgcgagtgcttttaatgtttctgtgtatcttttactgtggcgatcaataatttggtctgtgatagtatattgaatttttgaaagaccacctgttctagctaagatctttgttgcgttaccttgaggatctaaatctagaactaaggtttttttgtttctgataagggcattgtcgaatgcaagcattgtcgccatcttggtctttccaacaccgcctttaaaattaccgatagttaacgtagttgccataagaaacctccatctgtattgtatatataaagtataagttatatcaaaaaataagtcaattattaaagtataagttatataaaaatacataacttatacctttattaattaccttctattaaatcaatctgatgtttaattctaaaaagtgttgcttttgaagtgttgaaagcatcttggatgtaagctgattcctgagacaacttttaagagagggtataaggtagattgtaaaattaatccgaacgctgttcggacaaaaaagatcagcttcctttaaaatggtgtttaccacaaacccatcttttaggagctgatcttttgtctagtataacctattccgaacgaattaaaatcgaaaccttttgtgaactagggctgtccaatatccaaatgggcattaacagaaaaacgagttcgtttcatcccccactttctttttgcctttagaacgcttagaatatagcgtaagaaatcaagacgaggtggcaatatgacaacgcaagaacgacgtacagcaattctgaatgcaattcaaaagagtgcgcaacccatcagtgccaaagtattagcgcaacaatataaagttagccggcagacaattgttggggatatcgccttacttcgcgcacaaggggcccaaattattgcgacagttagcggttattacgaccaaacgcagacgcaacaaacaatgccatatcaggcacaagttgcctgtcagcataatcaggggcagactgaactcgaattgacaacgattgttgaaaatggggggcgcgtgatcgacgtgaccgttgatcatccattgtatggtgaactgaccggtcaactgggaatcggcaccttgacagatgtcaaatgctttatgcaaaaaatggccacaatgccccatcagaaattactttcaacattaaccgacggcattcatttacacacgattgaatgcgcgtcagaacaacgatttaagcaaattgtcgcagcgcttaaacagataaatatttattataatgcataattaggtgtcttgacatctgtaaactctttttgtatgataggaccattcataacataagggagtaatgcgggatgacaaaagaacataggacacttttatgggctgcaggtggtgcatggttgttcgatgcaatggatgtggggatgctatcgtttgtgattgctgcgcttgccaaagagtggcaactcagtagcgcacaaatgggattaattgggagtgtcagttcaattggaatggtttttggcgccgttattttcggcattttagctgataaaattggtcgaaaaaacagtttactttgttccttattagtattttcgattggcaatgggatatctgcctttagtacatcgttgagtctatttctagtacttcggttattggtcggtgctgggttgggtggcgagctaccggtagcctcgacattaatctcggagaatacgccaacggcatcgcgcggtcgggctgtcgtattgttagaaagtttttgggcagccgggtggttagttgccagtttactcgcctattttgtcattccagtttggggctggcgagtggtcttattgatcacgtcattgcccgccatctacacacttgtgttacggaaacatgttaaacaagagcatgaaccgacgacgattaaccgtaaggtaccattcatgcaacgattgcgtgttttatttgaaccagcgtatcgccaaagaacaattatgttatggctcgtatggtttttagtggtcttttcatactatgggatgtttttatggctccccagtgtgatggtcttaaaagggttcagcttggttaaaagttttgaatatgtgctgattatgaccttggcacaattaccaggctactttgtagcagcatggttgattgaaaaatgggggcggaaacgtgttttaggtggctttctaatcggaacagcactcagtgcattattgtttggcaatgcaaactcagttgccatgttactcgtggccggtgcgctgttatcctttttcaatcttggtgcatggggggcgctatatgcttataccccagaacaatatcctgcacttgtccgtggaagtgggagtggtttagcagctggcatcgggcgaattggcggtgtggttgggccatttttagttggtgcgctaattcagcagggggtatcagtagccgtgatttttacactttttacgggtgcgatactattagcggctggtgccgtgttctttttaggtcaagaaacgatgaacgccgttttaacggatgaataaagatttattaaaatcaactttacaattaaaacaacagatgcgacaatatgactcataggcgctcgtggctcaactggatagagcaatcgcctcctaagcgataggttgcgagttcgattctcgccgggcgcactttgaagcaattgtcgtaaaagcacactagattaactagtgtgctttttaattggtgtaaaataatcaagcggaatgattacgctttcactttcagaaagttacggatttatgatttatattaggtgaaaatatgttaaaatagattcgtattcaaaaatcgcaacgcaaaagttgcaattaatctggaggctttttcatgtcattagttaatggtacagaaatctttaaagctgctcgtgaaggtcattacgctgttggtgctttcaacacaaacaaccttgaatggacacgtgctatcttaggtgctgctcaagaaactaacacaccaatcttgatccaaacatcaatgggtgctgctaaatatatgggtggttacgaattatgcaagaacttggttgaacaaacaatcaagtcaatgaacatcacagttcctgttatcatgcatttagatcacggtaactacgaagctgctaaagaatgtatcgaagttggttacaactcagttatgttcgatggtcatgatttaccattcgaagaaaacttagcaaagacaaaagaaatcgttgctttagcacatgctaaaggcatctcagttgaagccgaagttggttcaattggtggcgaagaagacggtatcatcggtgctggcgaattagctgacgttgaagaagctaaacaattagcagctgctggtcctgactacttagcagttggtattggtaatattcatggtgtataccctgaaaactggcaaggtttaagctttgaccgtttacaagaattagctgacgttattgacttaccacttgtattacatggtggttcaggtattcctaaggaacaaatccttaaagcaatcgaaatgggtatctcaaaagttaacgttaatacagaacaacaaatcgcatggtcaaacgctgttaaagaatactatgcagaaaacaaagatcaagctgaaaaaggcttcgatcctcgtaaagttcttgcaccaggtacaaaagcaatcaaagacacagttgaatcacgtatcgaatggttcggtacaccagctgttaaataattattgttttttcaagagtccaacttcggttgggctttttttgtggtttcatgctagaatgagagcaaaataaaggtggggataagatgacagttattgagcaatataatgcaggccttacaactgatgctgatcgaacactcgcactggcaatgcacaccattcttcgggcagtgttaccggacgcagaaatgaagctggcttatggtttggttgggtattatcagcctaaagcagtttgctattttggcattaataaacggcacattgggttttatcccactaatcaaccgatggcccattttgcaaaagctgtcgcaccatgtcagaccggcaaagggacactacaattcgaaaaagatgtaacggcattaccaatcgagttgattcaaactatcgcgagttagcaattagaacacgttaataaataaggcttacccaaaatgggtaagcctattttttaatgaccactcgtcattttaatgccgagaattccgattactaataaaataacgaatagccaggttaataaagaaatgtgttcattgaataagatgatgccgactaaaatagctcccactgcgccaattccggtccaaaccggataagcaatgctcaatggtaatcccttcgtcgcacgaattagaaaaccgaagctgacgagcatgccagcaatcgtcagtaatgtgtaattgagcttagtgaacccaccactcattttcatagtcgttgcccaccaaacttctgccaatcttgcaatcaataaatcaacccatgccacacaatagaacctcctaataatatcggccacaaaaaaaggacagccaatcacttcttctttgacctaatgaagtgattaactgccccgtggcgacgattaaattaaatatagcatagcaaattttaggttaaaagtgaagcttagccgatagaaccaccaattaaataggtgacgaccatggttaagacgccggttaagacgttgcgtaaaacgcctttgagtcggtttgccttgcctaacgttgcactcgtgtaaccggtcgcgataagggcaagaacaattgaaccgatagttccactgactttgtaagggtatggaattgctaggatggcgatgattggcagcaatgagcctaacatgaatgagaaaaatgatgaaaaggcggcatgccacgggttgaagtaatggtgtaattcaatattgtatttttcgcggagtgtgatgtcaagactgtctttttgcatgaacgctgaagctacctgatgtgcaagtggagtgggtaagccttttgattcgtaagtccgttgtagactggccacttcagcagcgtattcgttttggatggcttctttttgaagccgcatcatggatttctgcgtatcacgttgcgtgctgaccgagacgtattcaccgccacccattgaaaaggcgccagcaagcatgccagaaataccagcaagaaaaatcgtgtactgactttggtgggcgctcgcgacaccgactacgattccagctacagagataatgccatcatttgcacctaagacgccggcgcggataatgttcaaacgttctgataaatggaaacgatgttcgagtggtgcactggcggataattctttcataatggcggactcctctggttgatttaacttcattatagctaattgagaaggattatcaatcgtttttgaacaattgttcaaaacaaaaacattgtataaaacctgttataccagtacatacgaatcattattactaacgaataatgatatagtgaacaaaaagtatgccaacagtctagcacatcaaaaagggtcgcaacaaaaattttgtcgcgaccctttcgaattataaatgtgtcagtgcttggtagtagaagaatgccgtgattgcggttaagactaaaccggcaacgcacacaatgattagaccaccaatcgcttgtttctggtaggcgctataggcggttagtccaatgaagaaggtggttagacaaacgcagacgccaaggagcatgagccatgtaatcattagtcagcccagtcaccgtttctgaaaatggggacaatctgaccgtcgtgcgttaagccatcgatgttcatttgactggaaccgaccatgaagtcaacgtgggcttgactacggtttaaaccagctgcttttaattcctcttcagacatatctgtgccgccttcaattgaaaaggcgtaagcagagccgagtgccaaatggtttgaagcattttcgtcaaataaggtattgtagaaggtgatctttgattgtgaaattggtgaaggatctggtacaagtgcgacttcacctaggctcttgaccccagcatcggtttgtaagagtttttgtaagacatcgttgccttcttcagcggtggctttgaccactttaccgttttcaaaagtaaattgcatgttgttgagtgtgttaccagcgtaactcaatggtttcgtagaagaaatgtagccatcgatgttgttggcatcagctgctgagaaaacttcctcagtaggcatgttagcgacgaatgaacgaccatcactactacggctaggaccacccatccagatgtggttttcaggtaacccaattgtgagatcagtgccaggggctgtgtaatggagtgctttgtattgcgcagcgtttaattcagcggctttggcttgcagtttcttaccatgttgttcccaagcaaggattgggtcttctttatctactcgggttgttttgaaaatctctgtccataacttatcagttgcggcttgttcgtccatatcaggaaagactttctttgcccaagcgggactagctgcggcaattacaatccaactatttttgttggcttgtgttgcttggcgaactttaagcattgcttgaccgtttgccttttgaacagcagcgacccgatcaccatcgagacccttaaggttatcaggatcgctcgacatcaccgaaatccgtttggcgttgtttgctaaccagtaatcgtattcttgtttttggaagtctggcacgttaacgaggcgatcttcggctttgtgttgcatattgattcgatcgatgtcgtcatcttgccatttgataatcacttcggctgcaccgaggtcataacaagcagctgtcatatcacgggcgaattcagcttgatcaacagcgatttgtaaaaccactgtatcaccaggttggacgttaattcctgttttagcgactaaagcggcgtatttttcaagattatgttggaaagtagtcatcaaaaattcctccttaagggcgatttaatatgtttatcatagcacatggcgatttaaaaaactcgtaaaacagataaaaacgttttcatgttatttaattttgtggtagagtgacagtagataatattgaaaaacggattgatcggttaaggagtgggaacgatggcacggacaaaacggattaaagcggagcaaattctggataaagcatacgaaatggtattagcggatggtttaaaagcaattacagcgcgcagccttgccaaggcactagactgttcgacacaacccatctatttagaattcggtaatatggccaatctcaagcaagccattttggaacaagccaaggcgcgtttggtgtggtatgtcagtgaagaacaacgaacagatgatgccttagtcaatctcgggattggctatattcattttgctacaatcgaaccagaactttaccgtgcgttatttattgataaccactttggtaaggatgaagcacaacttttcatggggcaactgacgcaaactagattgcaggactatcaaccgttaaaaacggttagtgagtcagaacacgaacgcattattaacgaagcgtggatcattattacgggtttggcgaccctaacgaatgcgaagttggtacactatagtgacgcagaaatagacgcgatgctcaaacgaatgttgaagcaatgtttttaaaaagagacgcctaaaaaggcgtccttttttatattcagactgttattcatttgtaaggtggttaaagattggcaaatctttagaaaatatgtagtataggggggtaacttattaaataataggaggcagctttgtgtctaaaattaaagtaatgactgtttttgggacacgaccagaagcaattaagatggcgccgctagtattagcattgaaagaacgcgcagatgaattcgaagctgtgacagtggtaactgcccaacatcgtcaaatgttagatcaagtacttgaaatctttaagattaaacctgattacgatttagacgttatgaaacaacggcaaacacttagtgaaattactagcaacgtattaatgaaccttgataaagtgattgcaactgaaaaaccggatatcgtattagtccatggggatacaaccactactttcgcagcaagcatcagtgcattctacaatcaaacagcgattggccatattgaagcaggactaagaacttgagataagtattcaccattcccagaagaaatgaatcgccaattaacagatgtactcagtgatctttattttgcactaaccagtcaaagtgaagccaacttattacaagaaaatcacccacaaaaggctatttacattacagggaatacagcaattgatgcattgaaacaaacggttcaaagcgactacaatcattcaatcttggatgttgttgatgctgacaaacgaatgattctagtaacaatgcatcgacgtgaaaaccaaggtgaaccaatgaaacgggtcttcaaggtaatgcgccaagttgttgaaacccatgatgatgttgaaatcgtctatccagtgcatttgaaccctgttgtgcaagaagaagcaccgtcattaggcaaacctgtgttggtcttacgggatacaactgaacgacctgaaggggttgaagcaggcacgttgaagttggttgggacacaaccagaacaagttcatgatgccatggttgaattattagatgatcaagccgtatatgaagcaatggcccatgccaagaatccatatggtgatggacaagcatctcaacggattttagatgcaattgcttatcattttggccaatcaaaagaaaaaccagaagcgtttaaataatgagcattgaaaaagccctcgaccattatcattttgactgataatggcaagggctttttttgatgagataaacgtgcggattcaaactgttttttgtcgtaatactcagttgctaagtgcaaccaaacgcactctatttcttttctttcacgatatacactggtctgtttttaacttctaggtagattttgccgatgtatttgccgacaatccctaggcataggagttgtaaaccgccgaccattaggataactgaaatgagtgatggccaaccgcttgttggatcgccaaaaatcaaagcgcgaataacgatgaagattaatgcaagcagggcaatcacgaatgagaaaaagccgacgaaggacgcaatggctaatggtgtttctgagaaagttacaatcccatccaatgaatatttgaagagtccccagaatgaccaactggtttgaccagcaacgcggtcttggttcttatattctaagtacttggtgtcaaagccgacccaactgaaaatcccttttgaaaaacggttgtattcagacatctctaagatggcattgaccatctgccgagtcatcaagcgataatcacgagcaccatccacgatttcagtttgtgaaatccggttgataatcttgtaaaattgtttagcgaagaacgaacgaacggggggttcacccgcacgtgttgtccggcgagtgccgacacagtcataaccttcgacttcaatgccgtgaatcatttcgggtaatagttcaggcggatcttgtaagtcaacatccatcactgaaacgtagtcgccagttgcggcttgtaagccagcatacaaggcagcctctttaccgaagttccgagagaatgaaatgtagtgaacgtgttcagggtcttgtgcctgtaacgcgcgcatttccgccaggctttcatcagcagaaccatcgttaacgaagatgtattcgatgcggtggtcggctagagtagccgctactttctcaactgctgcgtagaaaagcggaattgattcttgctcgttataacagggtacaataattgaaatcatcttaatcctccgaagtatctttgaaaatccatttgctaaatacatagttcgctaaaatcacgataatctgatctagcactttaacaatcatgttgggccataccaataaggaaatcccaacaaacataattgccgtatccattataaatgatataccacggaagaaaaagaaactagccatttcacgggaaaagtcctttaaagttgtatattttgactgaaagacccacgttttattggtgaaaaaggcaaatagcacggataagaaccaggcaatcgtgttgctgacgagataattgatagttgtatagtggtctaatccgaagaaaacgaccatgttgactagggttgttaagacaccaaagaccaaatacattaattgttcccagtatttttgaatgagttgttggatggctttaatcattgtgacctcttttcaaaatggcattgtaccgacggagaatccgcccccggagtgccatttgttgttctgtttttttgaaagtgtagcgggtggtgatgtagttgacaatgccgacaattaactgatcgataatcttggcggtcatactctgccaccctaagaaggagatggcgacaatcatcaaaccgttatccaagaaaaaggatacaccacggaaaaagaaaaacgaaagcacttcacgacacacagcgccaaacgtggtgtatttggattggaatacaagcgacttattggtaaaaaagccaaataaattcgcgacaaaccacgccattgtattggcgagtaaatacggccaaataatggtgtggcgaaatacccagtaagtaaaaatattaaccaacgatgctaaaaaaccaaaaatcgtataggtcaaaaaatcgcggtatttaaacactaaccgtttaatgaaagccataaagacagctcctagtttgatttattaaggtctaaaagaccaaaagaagggccgcggtaaaaagggacgtaaccgcggcccagggaagattggttgaaacgtgcttgttgaaacatacttctgcgcttaaccaaatttaccaaataggtgattgcatcacctattcggcaaatccagttaatgctcaaagcataaccgtttcaaacgcactctgccttgaaacgtgcttgttgaaacatacttctgcgcttaaccaaatttaccgaataggtgattgcatcacctattcggcaaatccagttaatgctcaaagcataaccgtttcaaacgcactctgccttgaaacgtgcttgttgaaacatacttctgcgcttaaccaaatttaccaaataggtgattgcatcacctattcggcaaatccagttaatgctcaaagcataaccgtttcaaacgcactctgccttgaaacgtgctttataagctagtatcctgtgcctagctacgtccggcaaacagccaacttgttggctattcaccagactaggttagtgctcggatactgaccgagcttataacgcactctgttttgcaacaatctctgatacgaatttttcaagatgttcgatatcttctgcttctgctgatagatcgactttgacaacgtctgaaccctttgttgcgccggtttgttcgaagacggctgcaaaatcatcaaccactttacagaagtcatcgtagaacgtatcaccggagccacagacaccgtagactttaccagttaaatcaatatccttgagatcttcgtagaaatcaacggcttcatcggggagatcgccatcatcgccataggtgtagctgcagacgatacagatatcgctgtcttcaaaatcggcaggatctgcttgagagatttcagtggtttcaacgtcgacgttcaaactttcgagggcttcttcaacgatttcggcaatttcctcgttattgccggtcatacttgcatagactactttagcagttgccattattgggacatcctttcacgtacgcggcgctcagtggccgcaattaacgaattatactataaggcattatagcaaaagccccttattaagaaaaggttcaacggctctttcacggttaattgaactaaaaagcgacgattcgtccattttaatggcagatagcgtataatatagaaatagatacaattaaaggctacaatggtaacaatattggaggtttcattttgattacattaaaatctgaacgagaaattaaagggatggctgcttctggcgccattattgccggcgttcatcgcggcttgcgtgacatcatcaaaccaggtatttcgagctgggtaattgaagaattcgcaaacgactacatcgaacaacacggtgccaaagcatctgaaaaaggctttgaaggctacaagtacgcaacttgtgtctgcgtgaatgaggaagtggcacatgccattccacggaagaacttaattctaaaagaaggcgacattgtcagtgtcgacatgaccgttaacttggacggttatgaaagtgattcttgctggacttatgcggttggcgaaatcgcaccagaattacaaaaattaatggacgatacgcgcaaagcactttacttaggcattgatcaagccgttgtcggcaatcgcctaggtgatatcggccacgccatccaacaatataccgaagttgaaaacagctacggtgacgtccgtgaattgattggacatggtattcaaccaacgatgcacgaacaaccaaacgtgccttcatacggtgaagcgggcaagggcttgcgccttaaagaggggatgaccatcacaattgaaccaatggtcatcttaggtggcacatggcacatcaagtcaaaagaagtccctggcgaagactgggaatattacgtctcagcagatggcacaccatgtgcgcaatatgaacacacaattgcgattaccaaagatggtcctaagattctaacctcacaagatccagaaatggatgctaaatatttactataaaattagaaaccttctctaaaatgagaaggtttctttttttgctttcagaaaactattagcccatagttaattcgtgtataatagaaatgataaacatgccttaagaagtcgggaaaataagcctttcaggtagaacgactaatgtgtaaaagagaatttggagtgacatatgacagtagacaatcaaaaccagttaccggtggtaaaacaggacttatccagacggcagaagttgattgctgtggtgaagttaatgatgttgcgttcatcagaagcaagcattagtgataattcgaaggtaatcgcatattattcgttattatcaatcttcccactattaatcgttatcgggaacatcttaccgtacttccagttagatgtaatgagtgtggcggattacgtccaaacggcggtgccgcccacgatattcgacaagattatgccagttctgcagtccctattgaagaaacgcaatgatggcttattgtccgtcgggatcttggggacgttgtgggcagcgagcatggggattaatgccttaaaaaatagtattaaccgcgcgtatcgtgttgaaaaagttcagaactttgttttaaaacgcctgatttctttggggagtacattattattacttctattattagtcggtttaattgttgtttttacattcgggcaacaagttttggaattattagtcccaatctttaacattcctaagacatacgttaatatttttagtagtttaaaatggccagtgacggggatcgccttgttcctactgctgattttcatctatttcttcgttccgaatgtgaaaatgcgattgcgaagtgttctgccaggggcagcactgacaacggttggctggttaattcttgcacaagccttctcattgtatattcgttacttcggcacgtcatggaatagttacggtgcaatcggtgcggtgattatcttactcttgtggctgaattattccgcaacgattctgatggttggggctgtcttgaatgttgtgattgaagaagcactgcatgggcatgttaacgccagtcgcggtaaggttcatgacttcattgcgcgtcggcgcgatcaaaatgaatgacagccgaaaaattaatgagacaaagcacaaatatgaattgaaacgttaaccaattatataggttgtaagaattcgggaatcaaccggatgattacaacctatttttagtctctaaaattaaaattatttatctcaaccgatatgtcaaactaatgtttttacatatcggttttttgatggacttagatttcgtaaaccactttcactttcgatactttaaaaatatttaattatttaaaaatcttgaatattgaattaccgcccaatgttaagggggttattcacaatttagtgtgaaaactaagtgttttttattaaggtgtattccagaaaaggatttcctttttaataaaagttatactataatagaaaatattgtagtataaatagtatgtaatgtgattgattatttttttgtttagttttcgaggaggatacgaaacggatgactgcagaagaacagaagcgacaccatcaccataagcaccggcgcagagggtggacattaacaaaagtgattttagttgttcttggggtattgattcttgccgggggcgcattcgcagctaaggtctatatggatgttaatcaaaccgccaagacagtgtataaatccaaaggtaagacacaaaataagcgcaaagtttcagaaaaagtcgaactgaataagaagacgcctttctcgatcctcttactcggtacagatacaggggaactaggccggaccgaaaaaggccggactgatacgatgatgcttgcgacggttaatccaacgactaaggaaactaatatgttgagtatcgcccgtgattcaagggtaccaattgttggctatggtcagacggctaagattaatgccgcgtatgcctatggtggcattccaatggcagttaatactgtccaagccttcttaaacgtaccggttgattactatgtattggttaacatgaagggcttggaacaattagtggatgccgttggtggcgtgaccgtggataatgatttggacttcacctatgaggggcaccacttcgaaaaaggaacggtacaattagatggatcaactgccttgaaattctcacggatgcgctacgatgatccacgcggagattttggtcggcaactccggcaacaagcaattgtccaagctgttttgaagaaagcaacttcattaaatatggtgacaaactataaccaaatcttacaggtgctagcgaataatatgcaaactaatatcaccttgaaggatgtcttgaacattcaacaaaattatggggatgcgatgaacttcaagacattacaattgaaagggactgggcagatgattgacgggcaatcgttccaagtcatgaatccaactgaggtatcaaagatgtcgacacttctaagaaaacaactagatttaaaataaccacggaagaagctaaccagtattggttaacttcttttcgtatggacaaagtagttataactgttaattaatttctggagggtatcatggaacaaacaattaatattgaacagattttcggcatcttgcgcaagtatcgccgcttaattctatcatcgacagtggtatgtacattattagctgttatcgtgacattctttttgattacaccacaatatagcgcttcaaccgaactgttagttaatcgcaagcaaagcggtgatgcaaatgtccaatggaatcaagtccaaaccgatgtacaaatgatcaatacgtataaggatttaattacgaaaccagtcattatggattcagtcgctaagaaaattaacaagggtagcaatcaaaaattagacgatacaactatcgcaagcatgattggcgtttcaaataatcaaaattcacaagttttctcaatcactgctaaagcagataatgcttatacagctgctgatattgccaatacaacagcgcaaactttccaaaaaaaggcacccaagattatgagtgggacagataatgtctctattatttcagaggctaaacctgatttaaagccagtttcacccaagaagaaattaaatgtgttaattggccttgccttagggatattactcggcgttgggattgccttcttacgtgagttgacggacaagacggttaaagacgaaagcttcctaacggatgatttaggcttaacaagcttaggcgttgtgaataacattgctgaaaaagatttaatcaaaaaagcgattatgagtgtcagcactagccgcttatcgagaagagggtaagaagaaatgggattatttagaaaagaaaagaaattagatcaagcaagtatgcaagaaggggtcggtttaattactttaactgatccgacttcagttattgcggaacaattccggacaatccgcacgaatattcaattttcatcaatcgatcaaaagttgcgcagtgtagtcttcacgtcatcaggcccttcgcaaggtaaatcaacggtgagtgctaacgttgctgtaacctgggctgatcaaggagttgatgtattgctagtcgatgctgatatgcgtcgaccaacagttcatcaaactttccaagtaccgaataaaaaaggcttaacgtcattattaacggaagaaaatttcgatttaaatagtgccattcaaaaaacaccggttgatcatttatttgttttaccatgtggggtagtaccacccaatccatcggaactattgaatactaagaaaatggataaattgattttagaattaacgaagcactttgatttagtgatttttgatgtaccgcctgtagtatcggtgacggatgcacaaatccttgctagcaaagttgatgggacaattctggtggtaccacaagggattgttgaaaagggttcggttgccaaggcaaaagagttgttagaagtcgttaatgcccgaattttaggaacaattatgaaccgcgttaaagcagaaaatacgggtggctactatggtggctactatggtgccaaagagtccaagaaatagtttaaattgggggaaataaagcatggagatacaaaaggaggacactagtcgggcgtcgattgaaaatacacaccaagtaatgctttttaatcaagctgttttagatcagcggtatatttatcgcggcttaaaacggttattcgatattgttgccagtttggcagggttaattctattaagcccgctatttttggtactggcgatttggattaaggttgatgatccagcgggtggggttttctactcacagactcgtttaggtctaaaacaaaagaaatttaaaatgtacaagtttagatcaatgtgtagtgatgctgatcagaagttaaaagatcttctcaaatataacgaggttgaaggtgcgatgtttaaaatgaaagaggaccctagaattacatcagtagggcgtttcattcgcaagtatagtattgatgaattaccacaattgtggaatgttctagttggcgatatgacgcttgttggaccgcgaccaccattggaacgtgaaattaaagagtatactgattacgattggcaacgcctaatggttaaaccggggtgtactggcttgtggcaggttagcgggcgcaacagtatcagcttccacgaaatggttgaattagatttgaaatatattagaaaaagtagtttggtttatgatttggggattctatttaggacagtcaaaatcatgattataccaaatgatgcgtattagtctgaggagaataaaatgagtaagaatgtatttattatcggtgccaaaggaatctgggttgtaaaagtccgattgaatatcgaatttttacaacccagaaagctgcttaaagtttcgtccaatatttggggttcacttcactcaacctctttttctatgcattatgatgatcacttgtttgtgtgatttgattaattttcgcgtgtaattcatggacttcagcttccttatccgctaacgctttatcaaatgttctttgattctttattttttctgcttcaaccgctgctttaatttgagcagcttgattgtcgcgtaattcagtgacttctttggtcatttccttttgtgctttccgttggctcaacgtgctgccagtcgctgccaagaaggtaatgatggcgccaatcaataatgacaccaaaataacgatgattaatggccatttaacatgggtgaatccaaagttaatggcgactggttcaacgtttaaaacagcaaaaattacgacaattaatgctaggaccaatactgtaattaatcgaccttgttttttcataaaactgccccccctacttcttattcaataagttaccggcaacatagtctccgatatgtggtgccagttgatagaattgtgcaccgatcgccatcaaccatggtgcattaatttcacgttttgcatgcccgattgttttcacaatccgataagctagttgatcaggatctaaaacaacccaatcgaccgatttcaaataattaccggtcttatccgcaatatcaaagaaagctgtatcaatcggcccaggattaacggtagtcacttgaaccccaaatggttttaattctaagcgtagaccatttgaatagccaacaaccgcgaacttagttgccgaatagatggccgacttaggcgttgccatcttgcccgccattgaagcaatgttaatgatgtggccgctaccttgttcaatcatcatccgcccaaaagcgcgcgtcatgtacattaaacctagcacattaacccggaacatctgctccacaacggtcatggatgtgtcgaatgcattttcaaaacttccaaaaccagcagcattgactaacacatctggaatcccgacttcagtttgcacctgagccacaatggtttcaatcgctgctggatcactgacatcgaggacatatgcatacgccggctgtcctgaaagccggtgtgcttcttcgcgaaccgccgccaattcagcttctcgacgggccaaaacgacgataattgcccctttactagcggcttcataggcaatcgctcgtcctaaaccagacgatccgccggtaatcaccacaattttacggtttaaatctctcaatgctgctaatttagtcatctgtttactcctttcgaccatgaaacggaatgtcatagatatctaagtcactaactacttttgtgtttttaaaaatatcgcgggcatcattttgtaaatcacgcactgcttgcccgaggtaccgggcagaaatatgggtcaataataaccgcttcacatgcgcggcttttgcgacctttgctgcattaatgttagttgaatggaaatattgacgcgcaatcttttgttcttgcttaccaaaggtcccttcatgcactaatacatctgcattagccgctaagcgttcaattggtggacattggcgggtatccccaataatggtcacaatccgtcctttttgagcatgtccaatgtaatctttgccatcaatttggcgcccatcagcgagtgtaaccacttctccctttttaatctttgcgtatacaggaccagccggaacaccatctgcatgcagtttctcaacttgcagttcccccggatggtccttttcaataatccgaaaaccataactggcaatccgatgatccaatttagcacattcaacccggaaagtcgcatcatcaatcaaaacaccttcttcaggaagaatgacaaagttcaatggatacgttaaatgactttcagagatttttaaactcgtgcgcacgtattcttcagttcccttagggccgtaaatcgtaagtggttcgtcgccaccttggaaagatcggcttgataaaaagcctggtaacccgaataaatgatccccatgtaaatgtgtgagaaagatctttttaactttgcgcggttttaatgtcgtttttaagatttgatgttgcgttgcttcaccgacgtcaaacaaccacacttcatttcgttcatccaataatttcaatgcgacacttgtgacgtttcgttgtcgtgctggaactccagcgcctgttcctaaaaattctaattccatttagctcttccaatctgtctttaattcaacgctttattttgccgcgagggctttggtaataatggcggcatattcattgaccccagttgggttcggatgcaccttatcttggtagaaccagtcactgtgtttggcagcctgtgaataccaatcaatcaccgttaagtttggatactgtttagttgcatttttaagcgcctggttaacatcattttgccaaggacgcgttgggacaaacgcgttgagccaatagacttttcgcttagtcccaatggctgccataaattgcgccatctgttcttgcgtaaaggcgccatttgttcctagactgaccagtacagtatcgctaagggcttgtttttgatcataatcttttacaatttgaatactttgatagagttggcgcccaacagccgcatcaaccaacatattcgggaataacttctgtaaagcttgactaccgtcgagtaggacggaatcaccaattgcagtcaccgagatattctgggcccgttgaatcgtcacttgactcaagccatatttttcaaattcttggttgattggatgcttttgcgcagccgcctcagccgctttttcagcttttgaagttggaccatttgcttgtccagctttattctgggcttttgcttttttaatcaacgcatccttacgcttttggttagctttttgattttgcttaatattgaccgctaatgccgatttatgcgtatctggcgccggttggaatggcgcttgaaacgccccgactaacccgattaaaaagacaattgcgagtccagtcactcgaccaaccacccgattccaatgtggttggtgcataaattgcttcaattggtgccataactgcttgtacggatagtgtgctagtggctgttcaataaaccggtaggataattcggtcaatccgaaaataatcgccacttcaatcactggatataaaaccgggtgatcagcgatatttttgaagattatttcaaagaaaatcatcaccggaaattgatacagataaatcccgtaactccgtttacctaaccagttaaagaccggattcgtcaataaccgattccaatcagcgcctggatgagcgacaactgccactaaaacacagactaaagcactaaacagaaatagtcccccgcgatagacaagactactctcggcattcaacttaaccattaaccaaaccaaactgaggacactcactaacccgatgccatcgaggacgaggcgttgtttaggcacaatcttttgcttaagggctgttgatggccaaacaaacgccagcgctgctcctagtaaaattgaaaagacccgcgtatccgttccataatacaaacgactagggtcagcattgggttggtacaaaatggccatccagattgctgaaacaacactgactgctagtaatacttgggcaatccgatttttattcttaagaccaataatcaaggccacaacgataaaaggccaaattagatagaactgcccttcaatcgatagtgtccacagatgggtaaacggcgactcattattggcaaaccgatcgaaatacgactgaccatgtccaatttgccaccagttataaacgtataaaatgttcgtgataataatctgattaagttgctgtaacatttcccgctgaaaaagcgtgatgtacgcgcccgttgcaaacagcatcgttatcagcccagggtacaatcgttttacccggcgtaagtaaaaactttttaaattaatccattgattttgttcccactcttgaaccaacaaatcggtgattagataccccgaaaccaccatgaagattgggacccctaaataaccaccggtaaaagtatatggcatcagatggtataaaataacaccaatcacgccgattgcgcgtaaaccatcaaagccagtaatgtaacgactattctttaaacgcttcttgcccgccattttttcaacctactctacattctaataactgctattataacaatattttagtgatgtgcctacattaagccctgttattttatgcatcccatagaaaaaggaagcattcaaaaatgaatgtcttcctttcttgacgtgcctattattcgacaaattcaaacgtaaagttatcaattgccactaaatcaccatcatgtgcgccactttcgcgtaaggcttcgtcaatccccattgaacgtaattgacgggcaaaacgcatgacaccatcttgatgatccaagttactcatcttgaagagtttttcaaccttgtcaccagacacaataaacgtgccgtattcatcttgttcaatgatgaaagcaggtgcttccggttgatattgataaagtttttgcgtttgaacttcttcgacgtctcccattgggaattcagtcgtttcagctaataagtcagctgtcttgttcatcaatgattgcaccccttgatgcgtgatacttgaaatttcaaaaatctcatgtgtatcgccggcagctgctaatttttgtttaaactcggctaataattcagaagaacctggtaaatccatcttagtcgctacaatcacttgtggtcgttctaagatttttggatcataggtctctaattcgtgattaatttgttggtaatcttcaaatgggtcgcgacccgtttgatcgtccatttcgattaaatgcaagacaacccgtgttcgttcaacgtgccgtaagaattgaatccctaaaccaacaccgtctgaagccccttcgattaaccccggtaaatcggctaagacaaagtcccgaccgtcatcgagttgcaccatccctaagttagggaccaacgttgtaaattggtaactagcaatcttaggtttcgcacttgtcaccactgacaacaacgttgatttcccaacagatgggaaaccaaccaacccaacatcagcaagcacttttaattcaagttgaatgctgcgttcttcaccaggttcaccgttttcggcaacttccggcgcactattacgggcatttgcgaaatgcatattcccacgaccaccacgaccgcccttagcaatcactaattgttggccatcttcggttaaatcaccgagtaattcattggtttcagcatcgcgcaccgttgtaccaggtggcacttgaacaaatgtatcctcggcaccgcggccgtacatttgtttattctgaccattaccaccactattggctttaaagtgatgacggtaacgaaagtccattaatgttcgtagaccttcatctaccactaaaatgacacttccgccccgaccaccatcgccaccggctggtccgccaagtggcacaaacttttcacggcgaaatgcaactgcaccatcgccgcctttaccagctttcacatcaattttgacttgatctacaaacatattttgactccttctcatcgttaaacagtaccttatatactaccgaaaaaaagattaaaagtaaacagataactggttaaacactgaattggctctatcatcgataaaaagcgcactgagtgagtgacctcaatcagtacgctttttattcgttaattaatggctagctggcaccaatttaaattggctccatggtttcaaatagtctaataggaataattctgtaggcgtaatacggccaaccacattcacgcgcccgtcatttggcatggctttgagggcaatttgggtttcccctttatactgaccgtaaccgacgttatcgattaaaatatcaccgtgttggatgtcaactgtatggtgggctgggaaaagcaggtctttaaaaatgacccgtgtcatcgttgaccgtagaagatattctgaacgatcgccacgataactatgcagactttcaaagaggaccttgcgttcatcagccgtaatgtcatctgcgacgtcgattgcgattgctgggaattcagcgttaaagacgtcatgcatcgtcttcaattctgcttccgaagcatacgcattaccgacaataatgtcatcaatgttatccattaaaacgtaatgtttcatctgcgttgccatcgttaaatcgcgatcaacttccatcgtgggcaacccatcttgtgttggccatggtccgaaagtcgcttcatgtgaattgacaaacgctgctgtattcaaattgtattttgcaaattgcgccgtacattgtttgaagaagtcttcacctaatcccgagaaccgatgtggatagaagttatgacaacctaacaagttttctcgtttgggtgaataactcataatgttatcaacgtaacttgtcccttgactcatattaatttcaatttttaaattaaacggattgcgcgtcatttccgcttcttcttggccggtaaaaccgttgtccaaccgaattccccaagcaccaagttcatggaaaaaacttaaattatcatatgaaataccgagttgcttgaacaaacccggattgatatcaatcatgacttgcattcctaattggttggcatgggctacaacccgtttaaagttgcctaacacggcttcttgatcgccagacacctccaataatgatgtaaagacgcgttggaacccatattgatgcgctaaatctaagtaagccgcatccttttcaaaagttgatcgttctggataaattgaaacgcctagttttcccatgaatagaacctcctaataattgggctataccaccctgtcatctattagtctagcataccttaagcacttttgaaaactcttacattacttttaaactggtctatttctggcattgtccgcagtttgctcactaacgcaccaatctttttttcggtctatatcagcgttttgatggtttttgaacgtttttgaaatatttcgattgcttttgaatggaaacgatgtcataatgatgctacggaggttttgtcatgttaacagaagaacgtcaccaagcgatattacaacttttaaagcaacaagacgtcgttaagatgcaatctttgtgccagctattgaacacttctgaatcaactgtccgtcgtgacttgcaattgctcgaagaacaagggcttgctactcgaattcacggtggtgctaagcgcatcaacacgttacaagaagaacttggccagattgaaaaaaacggcaagaacgttcatgaaaaaaacgcgattgctaagtttgccgcagcacaaatccaacaaggctgcgtcatttacttagatgccggcacaacgacccaggcaatcatcccctacttaagacctgaaatgaatttgacggtcgtcaccaatggggttgataccgcttctctcttagccgatcaccaaattcaaacctttctattaggtgggcgtgttaagagcaaaaccaaagcgatggtcggtgcggctgctttagaaacccttttgcaattccaattcaatcaggcgattcttggcacaaacggtatcgatgttgaagctgggctaaccacccctgatccagaagaagccactctaaagcgctttgcgattcaacaagcgaaccaaacgatggttttggcggatcacacaaaattcgacgctgtttcgttcagtaagtttgccccattggcacaagtccaattgattactgatcaattgtcaccatctgtttacaaacactatcattcacacacagaaatccaggaggttttatcttgatttatacgattacggcgaatccatcaatcgattacgtcattcaacttgaaaaactaaataccggcaacgtgaaccgcgtccaatctgacgttaagctccccggtggtaaagggattaacgtttcacgcatccttgccgaattagcattaccaagcgttgccctcggctttgtcggtggcttcactggtcaattcattcaaagcaaactcaacaacgcttcgatcgactgtcgattcactgaagtcgaagaagacacccggattaacgtgaagttaaaagacaatactgaagaaactgaaattaacggtcaaggcccacacatttcagcagaagccgttgccaacttgaaacaacaactggctaagctagaagccggcgatattgtcttcatgtctgggagtttgccacctaatttaccggctagtttctacaaagacttaatcccattgattcaagcgcacaacgctgaatttgtaattgatacaaccggtcaagctttgttagacacattggctgaaaaaccattggtcatcaaacccaaccatcacgaattggccgaactgttcgacacacactttgccaaccaaagtgaaatcatcgccgctggtcgcaaattattagaccaaggtgcccaacatgtcttggtctcaatggccggtgacggtgcccttttaatcacaccagaccacgcttacctcggtggtacacctaaagggacagtgattaattccgttggggctggtgattcaatgatcgccggttttgtcggcacattcgcacaacatcacgatgcactcgccgcttttaaaacaagtcttgcttgtggtagtgccaccgccttttctgaagatttagccactagcgctaagattaacgaactcttacctcaaattgaaatcacacaagttgattaattttaaatacaaaggagatttattatgaacatccaagatttactcttaaaagatgcgatgatcatggatttacaagcaacgactaaagaagccgctgttgatgaaatggttgcccgctataaagacatcggtgttatcacagatgacgccctctatcgtaaagatattttggctcgtgaagcccaatcatcaactggaattggcgaagggattgcaatgccccatgcaaaagacagtgccgttcaacgcgcaactgtgctattcgctaaaagtcaaaacggtgttgaatatgacgcactagacggccaacccgtttacttgttcttcatgattgccgctccagaaggcgctaacgatacgcatttacaagccttggctggtctttcatcccttttaatcaacccacaattagtcgctgatttgaaacaagcccaaacaccagaagacgtgcaaacgctctttgctaaggctcaagctgctaaagacgcagaagatgcgaaggaagaagctgaagaagccgctaaagcacaagccgcagccgcaacgccagctgatgatcaaaaaccattcatcgttgctgtcacagcctgcccaactgggattgcccacacttacatggccgaagctgccttgaaagaaacagctgctaaaatgggcatcgacattaaagttgaaacaaacggttctgaaggcgttaaacatcaattaaccgctgacgatattaaccgcgcaacaggggttatcatcgctgccgacaagaaagtcgatatgcctcgttttgatggtaaacatctcttgaaccgtcccgtgatcgacggcatcaagaaaccagctgaattgattcaaaaaacattggatgaagaaggctcaatctatcacgcaactgaaagccaatcaagcgaagaagcttcagctgacaagaaaaccctttggagtcgcatctaccaagatttaatgaatggtgtttcaaacatgttaccattcgttgtcggtggtgggatcttgatggccatctcattccttttggaacaaaccgttggcgcacattcaaccacttttattttcttgaactcattaggcaataatgcctttaacttcttaattccggtccttgctgcttacatcgcgatttcaatcggtgatcggcctgccttaatgcccggatttgtcgggggctacatggctagccaagcaacagccagtgtccttgcttcaaagagtccagccggattccttggcggtttagctgctgggttcatcgctggttgggtgatcgttggtttgaagaaagtcttcaagaacttgccacaaacccttgatggtttaaaaccaatcttaatattccctgtattaggactatcgattgttggctttattatgtacttcatgatcaacccagtctttgctcaaattaacctctggttgagtaccttcttaacacacttaggggctggtaacgcattactacttggtgcgattttaggtggcatgatgtccgttgatatgggcggtcctttcaacaaggctgcttataccttcgcaatcggtgtcttcacaaccaccaaagatggttcattgatggccgctgtcatggctggtgggatggtcccaccattggcaatcgcggttgctgctactattttcaaaaacaaatttaccggtagtgaacggaaacaagccttcgcaaactatgtattagggatttcattcattactgaaggtgccattccatttgctgcatcagatccattacacgtgattgtttcaagtattatcggttcagcaatcggtggtggtttaacccaattatggcaaatcactgtccctgcaccacatggtgggatcttcgtggcaccacttgccaaccacggcctactctttgtgcttgccgtgttaatcggaacatttgtcagtgccctaatcttaggcctctggcgtccagtggcaaaagaagcttaatttaaaaagtcgtagtcaaatgactgcgactttttatttatcttgaaaatcagtattgtgcttttgtttccattcattaatgtaattcaaacgttgtttcatccgcgtttcattgccttgttcggtcggccggtaataaatatggtcggcgatactctctggtctagttggcatcgtggtcaatctatcatcgtagaaatgtgcgagttgatatcctttgccgtaaccgacttccttcatcaatttcgtcgccgcattacgcaagtgcaatggcacgggttcatcaatcgtctttttaatatccttttgcaccgctgtccgcgccttataagtggcgtttgatttcggcgcaagcgatagataaatcacgcactgtgttaaatgcacgtcgcattccggtaagccaatcgcctgacaagcttgaaagacgttcattgctaaattcaatgcattgttatcggccagaccaatgtcctcactcgcaaaacgaacgagccgccgagcaatataaatcgggtcttcgccgccgtcaatcatccgccccaaccaataaatcgctgagtcgacatcactattgcgcatcgacttatgcaaagccgaaataatattatagtgttcctcaccgtctttatcataataggcggtttttttatttagcagttcccccaatagatcgccatcgacggtcacttgatggtcttgcacatcactattaataactaacatttctaaaatattcagcgccgtccgtgcatccccattcgaaaagatggcgacttgcttcaataattcatcactgatatgaaccgttaaatccgggaaagcttggggcgcctttaaaacccgttgtagcaactcaataatgtccgcttccgtcaattgctttagcacaaaaacgcgtgaacgcgacagcaatgctgaattgatttcaaacgacggattttcggttgtcgcaccaattaggataatgctgcctttttcaacatacggtaaaaaagcatcctgttgcgccttgttaaaccggtgaatttcatcaataaagacaatcgtccgctcacccagttggcggttttcttcggcttcattcataatcttccgaatctctttgatcccattcatcgcggcactaaacgtgataaatttcgaagccgtcttgcgcgcgataatctccgccaacgtggtcttcccaacgccgggtggtccccagaaaatcatcgaagtcacttgatctttatcaatcatttcgcgtaaaaacttgcctggtccgactaaatgcttctgaccgacaaaactgtctaaatcagacggtcggacccgattagcaagcggcgcattcatcgccatctcttgatcaaacaaagaggtttgtcccattttttcaccctactttagttgttgttaattgaaacttcttaaaatgtgcccgtaaatgacttaaggttaaactctccgcgtctgaggcaacaagctcaaatggtgcacccatcgccatcacttggcctccttgactaccacctttaggccccaagtcgatcaggtaatcggcattggtcatcaaatcaaggtcgtgggtaatcatcataatggtggcacccttggattttagctggttgatgacgcctactaaggtttcaacatcgcgcggatgcaagccaacagaaggttcatcgaagacgaataaagtgcccgcccgttttttattcaaatgcgttgcgagttttaagcgctgtgcttcgccacccgaaagactcggtgtactttcaccaaggtgtaaataagctaagccaatttctttgagaatcttaagttccttttgaattgctggcacatctgcaaagaccgggattgcttcttccaccgataaagccaatagatcaacgatgctatagccttgccacttgatggcttcaatctctggtttgtagcggttaccatgacattctggacaggtttcttccatgtctggcaaatattgaatatccaaaataatgctgcctaacccaccacagttcggacaggcgccttctttattgttatacgaaaagtgcgcgatcccataatgatgcgcttgtgattctgataaaccagcaaataatttccgcagattgttcatgatactcgtatcagtcgcgagtgttgagcgtgtattcttaccaaccggcttggcatcaatgctgacgactgacgttaaatcggtcgtcaactgggtgacctgctcgggtaattgctcatgttggtggtgcgcttcaattgctggcactaaactatctagaatcaaactcgtcttcccggcgccggaaaacccagaaaccgccgtaatttggttatctggcactttgattgtgacatcatgcagattaaaatattggccaaccgtcatcgttgtctgctcaccagtcgttgcggcagtgactttaggatataagatgttcgctcgaccagcgatatagtggccaatcagggactgtggattctggatcaaatccgcgggtttcccttgggcaatcacttgttccctttgcgcccagcttctggcccaatttcaatcacccaatccgcttgactgatgatattcacttcatgatcaactaccactaacgaattgccttgtgccactagctgccggaaaatatgaattagcccttcgacgttgtcaggatgcagcccaaccaatggttcatctaaaacgtacaacacaccagttgtcgctgttcgcaacgtccgcgccaattgaatccgttggagctcgccagtcgacaatgtattcccattgcgcgacaacgttaaataatccaaccctaattctagtaacggttgcagtgtttctaataggttcttaaataaaattgtcgccatttgctacatttcatccggtaagtcggccttagtagcacgcacccaatcttctaatgcgcctaacgtcaaattagaaactgctgcaatgttttgtccgccaactgtttgggtcagtaatgccggatttaaccgggtcccatgacacgttggacaggttgaaaaatggaaaaatgaattgactttagccattgcccgatcacttttaaccgattttagcgattcataaacagcgtcataagcattttcatagagggtattctccgtactaaacacacggcccgttgaggtatggaaatcaaccgcatacttcgcccgtttaccatgcaggacaatttctttttccttggccgtcaagtccttgtaagggacatcaattcggaccccaatgtgggcagcaacggttggcatgaaatttcggcccggcaatcgccatgaggcaatcgctccgtcttcaatactgagattttcatccgcgatgattttgcgatcatctaacgtttgaatctgccccgtcccatgacattctgggcaggcgccagctgaattaaaggcaaagtcttcggccgatttagccataaactgcacttggcaagtagggcacgtaataatccccattttatcgccagctaagtccatcgcttgggcaatttttagacttggttgaatcacgtgcccatttggacaacgtgtcgtccctaaccgtgaaaaaatcaatctgacgacattaaaaatctcactcatcgaaccaacagttgaccgttctgatggcacacttggtcgttgcccaagtgcaatcgctgatggaatatgccgcacttcttggacttgtgagcgtttattctgcgtaattcggcgccgcgtgtacgtcgacaacgcctctaaataacgccgtgagccttctgcatataaaatccccatcgcaagcgaactttttcctgaaccagacggtcccgaaatcgccacaaattggttcaacggaatatcgacgttaatatttttcaagttattgacgttcccgccacgcacttcaatctacgttggttgttcaattgtcattattggttcgctccccgtttgcttgacggttaaaaacggccgcctctgcttctaaattcgctaaaattcgttctaaatagccgtcaacagctgccacttcagcatccgaaaagcccttgtaaaaaacggcgctcaatcgttgactaacgtcatcaccgacctgttgctgattagcgccttgttcagttaagtcaaagacccgcttgcgcttatcaagtggcgattgctcactcatcaataatccctgttcttctaagcgccgtaacatcaacgataaactactattggctaagccagtcacttgtgccaattccgtagcagtttgcggatgatgatcccacaatgctgacaaaattttcccctgttcagcgttatagcacgcgcgtggatcagccgttaaataacgattaaaaagtcgggtatttaataagcgaatcttcaaagttaaataaccaccctttttggttttcatcccgtccactcctaaattgtttttatatcagcattaattatatcttactatataaaactaattttagcgagtaaaaaacaccatggtcaaccacggtgtttctaaagaagctgtttcaattgttctgcttggacactgcggacttcttcgactactactagcgcctgcttgtcaatcgttgagaccaccggtacgagcgtcgcgagttgtttggccgtacaaatgacatacagcatcggtcggtcattttgactatagtacccttgcgctttaatgatcgtgatgccctggtggaattgcgtcgacaatgtttgggcaatcgttgcatattgatccgaaataatcgtcaccgcgcgttttgccccaaatttagccaacaatttattcaaaacgactgctgataaatacaattcaataatcgttaagagcatattttggaagccgataatgaagccggatggaatggcgacaattaaatcaaaaaaaagcatcgcagagccgttttggatccctaaatagcgattggcaatcttcgctaagatcgtactaccagcaatcgtcccttggcaatgaataataatcgccattgcaatccccatcaagacgccaccaattatcgtcggaatgatcgtctgtgtcgtatggtagccgataaaatgcgggagccgcaagaagatagaaatccagagtaccgcccagaccgaataccagatggtttgcttctctaaatacttaaagccgacaatcactaataaaccgtttagaaccaaattcgtagcagctggcggaattgctaacgcatagtagccaatcgccgttaagccagtcacgccaccttcaccaatatgatgaggaatcaggaaatcattaatcgccaccgcataaatcaaggcgccaatgataatcccgagaccatttttaaaaagtgcttttttctgcatcccactcacgtcctcgttcaaactaacataagcgtaccatatttagggtgggagattaaagaacaattgattaactattaatttacaatactctatatttttcctgtgctaagaaaccatttacttactttagaacactctgccagtcattacttgaagcccatccattgtatatacttccacaatgtccctatcaacaatcagcaatacatcatcaatatttcctgtaatttgacgcctttcaattttcgatgttgcccattgacgtctttcaaaatataaccggtcctgatactttttcaagacaacattttgatagatttttattcgcgcgttttataatcaagttagccaaatacttttagctaattgataaaataaaaaacaccaagacacacaaattcaatttgtgcggggctttttagattgttgattagttccgttcaacgtttaaatcattcatcttaagcattgtatcaacggccttttccattgtttcgattgaaacaaattcgtagcgaccgtgcatgttttcagcaccagcaaagatgttaggggttggaatacccatgaatgaaatcttagaaccatctgtcccaccacgaacaggttcgattaatggtttgatatcaacggcttccattgcatctttagcaagatcaacaacgtccatgtgatcttttaagacttctgccatgttgtagtattgatctttgattgttgcaacaacgcggccttcaccgtatttagcattcatttgatcagcaactttagcagcaaatgctttgcgttcttccaaaccatcacgttcgaaatcacgaatgatgtaagccatgtgtgcttcatcaactgtgccttcaaggcttaataagtgatagaaaccttgacgaccgtctgttttttcagggacttcatcgcttggtaaagcattttggaaatcaacagccacttgaagggcattgatcatgatgtttttagcttcactaggatgcacgtttttaccttgaatatcgactttcatggcagcagcgttgaatgtttcgtattcaagttgaccgattggaccgccatccattgtgtaagcaaagtcggttgcgaaatctttggcatcaaagtgatcagcgccagttccgatttcttcatcggggccaaaaccaatcttgatgtcgccatgtttgatttcaggatgttggactaagaagtccatggctgtcatgatttcagcaaccccagacttatcatctgaacctaataatgttgagccgtcagttgtgattaaagtttggcctttataatttttcatatttgggaattctttaggatctaatacgaatttacccgcatcatctaatttaataattgattcgccatcatagttttcgacgatttgtggattgacacctttggcattgaagtcggcagtatcaacgtgtgataaaaagcccattgttggcacttttttatcaatattacttggtaatagcgctgttacatagccattactttcgttgtatttcacatcacttaatccgatttccttcaagtcgtccatcaatttgtgtaaaaataccacttgtgtttgggttgatgggctcgttgttgcgttttcatctgaacgtgtttcagttgtgacatattctagaaaacgaggaatcaatttttcatatttagccatggtgtagcctcctagatattatttaatactaattctattctaacctacttcgcattaaaaataaatgtaaacggatcagttttttgctgtgatttaatgaatgtaaccgaccaaccacgctgtttggcccacttttcaaaaatttctgtcatcttatccttcacaatactttcgacatgatgaccaggatcaattactgacaaaccagctgccaacatatcgtgaccagtatgataatacacatcaccggtaatgtagacatccgcaccagcttgtaaagcggctgggaagaatttacccccatcgccaccgacaacggcgactgtctgaactattttgtccggttcatttgaaattaagcgcagacctgttaaatcaaatgtttcgcagacaaattgcgcataatcccggaccgtcattgattgagcgacttgaccaatgcgcccaataccaatcggttgttgttgattagctaatggaatcacatcataaacgggttcttcataaggatgcgccgcaagcatcgcctgaacaactttggtttgcatggccactggcagaacaacttcgattttaacttcggtaaccgcttctagatcacctgattggccgatataaggatttgctgcgtccgttggttgaaaacgccctattccggtcgtgctaaaactgcaggcttgataatcgccaatatgtcccgcatcagcttgattcaatgccatccgcatctgttcagcatgtgactcagggacaaagaccaccaattttactaatgattggtagtccgtgatgttaaacggttgcacatcgtttagttgtaaagcttcagctagccaatcattcatgccgccgttagtcttatccaaattcgtatgggcggcatataccgtgatgtcatgcgttaacagatccgcatacatcttgttttgcggatcacttagatcgagattccgcgctgggcgaaacattactggatggtgggcaaaaataaaatcaacattctgttcaatcgcttcttgaacggtttctgggcggacatcaagggttactaacacccgttcaatgcttttatcgcgtcgcccgatttgaaaaccggtggggtcattgccttcttttaatgccaatggtgcgtagtcttcaatcgcagcaattaagtcactcgcgactaattttcccatgtcttcatctcctcgattaatgcaatttcatgttcaactgctttgactttatcagtaggtacgacttgtgcgttttgtaattgttgcaataaatgacgccgttttttcaacattgtcccccacttcaattggaaatcagcaggttgtgtttggcggagaacagggccaaacactcgatcactttcgcttaatggtgcaactgatggttggggttcgccaacaatcacttcgtagatatgcccgtcttcagcgacaatcgcttcatcaacgattgcatagtcatgtgcattcaaccattcacggacagtactttccatgatattgggttgtaacacgagtcgttcatggccgttcagatgatccaatccacgggttaaaatttccgtgatcaataaaccacccatgccggcaatcacgatgcaactcacatggtcttcttcaggattcaatacctcgacgccatcgcctaagcggacttgaatctgttgttgtaagtgccattgattaacgtgagtctgtgttgattcaaacggaccggcaactacttcaccggcaatggcgcccttcaaccggttttgttccgtaagccaaattggtaaatatgcatgatctgaaccgatatcagcaacaatgctatcttgtgggacaaactgcgcaaccgcagctaaacgctttgataaatgaattggtgacaaaaataaaactccattctagaaactttgattgttatagttagtataccaaattttagacggcatacgcagtcaaagtgaacacttgattctggatagcagaagttgctttaggcaaaatttagttttatactgaaattaaatcgaaaacgctttctatacattaaggagtggtctcatgagttggttgcaactattctgtgttttcatgattggtttaggcatttttcaaatttataagtcgtatcagtattatcaagacttaaaattacacgcagatcaaaatacttctgtctttgcgccagcagcgctctgttcgagtgctttcatggggcttgtctttattgggattagtcttgctagtttattgaattggttataaacgtcaattagccccttctttttgagctttattagttttcgaaaatcctagttaacataagataaattatttacagtgaagggggtggtaacatgaactggttaccaattattgggattttaatgctaatcatcggtgttttccaactttcaatgaccattaaaacattcaagactttgaaggttgaagcaaaccacagtacttcagtcttcatgcccatggcgttatggtcaggtgcattgatggggattgtatttttagtagtggggattggtgctctgcttgtttagatacacgcaaaaaaggccgcaagctaggttagcttgcggcctttttattgattgcctaaacgtgctttttagttcaacaacttccgcttaatctaacattgccattaattctaaaatctgaattaatgacaatattgtattaatgctcagttgctcccgtaactaaacgcactttatcgaaaacgtgctctagcaggcatatttctgcggctagctacgtcagtcaaacaaccaacatcgttggttattcgcctgactatgctaaccctcaaaatatagccgcctgcttacgcactcttttattctaaaaagtcttttaattgttttgaacgtgatgggtggcggagtttccgtaatgctttggcttcgatttgacgaatccgttctcgcgtaacgccgaacaccttacccacttcttctaatgtccgtgtccgaccatcatcaaggccgaaacgtaaacgtaagacgttttcttcgcggtctgttaaggtatctaggacactttctaattgttctttcaacaattcataagaagcatgttcttcaggactggttgcatcttgatcttcgataaaatcgcctaagtgtgaatcgtcctcttcaccaattggggtttcaagggaaacaggttcttgagcgatcttcaagatttcgcgcaccttatccgtattcatatccatttcagcaccaatttcttcaggcgttggttcgcggcccaaatcttgaagtaattgtcgttgaatccggattaacttgttaatcgtttcaaccatgtggacaggaatccgaatggtccgggcttgatcggcaatcgcacgcgtaatcgcttgacgaatccaccatgtggcatatgttgagaatttgaaccctttacggtgatcgaatttttcaacggccttcattaagcccatgttcccttcttgaattaaatccaagaattgcatgccacggccaacataccgtttagcgattgaaaccaccaaacgcaagttagcttcggcaaggcgttgcttggcttcttgatcaccttgttcgattctcaaggctaagtcaacttcttgttgggcgtttaaaagagatacccgcccaatttcttttaagtacatccgcacaggatcgttaatcttaatcccggttggtgcagtcatatcttttaattctttagcagaaaccttttcctttttaagggtagcggcacttggattcccatcttcatcgacaatcccaatcccttggtcttccactttttgcattaattcattgatttcatcagcttgtagcgcaaatggtttcacgatttttgcaacgagttcatcattggtgatttctttctttggtttgtattccttaattaaagccttaaccgcagtatcaaatttcttcgtgtcagcttttttattatcagccattcagaaacctcctaatatcaatttcctaatttcttttgcgaaacaagtctaatgacctccagggttaagcgcgtttcttcgctcgcattccccaatttggtcgcctcttttaaggcaattttcgcttctcttaattgttcctcaacgttattttgcgcaatgacgaacagacagtcgtttaacgcctcttgacttgcctcttctggtaagtcaagcgcatcaatctgaacgactaaggcttgtaagtcatctgggatataacccatgaagtcggccaaggtcgacttaccttcagctaaaaaggcgcgccataactcgtaaatcagttggtacggggtatgcacaaaactaaaatcggcattgttctccaattgcaggcgcatatcgtcattagccatcaacatatgcaacacttcttgctccgcgtgttcaacccgggttagccgttgtggctgacgcgtcgctgttgcccgcggatcaccaatgattggcggtggtccacccacaaatgcgtcatccggttcaggtggcatgtcataatcatactgactagatgccggtgcaagtggttgctgcgttgcccgtttaacgcgcaatgtttgtaactgccgcttcaacgtatcaagggtaatgccgctatcggcttcaatttgcttgaggtaaatctcgatttcaagcggcgaatcaattggcgcaacgacggacaatgcctgttgcacgtaatcaagttgatccttctcgttatccagatttaacccttgcttcaaataccgcagttcaaatgcaatcggtgtttcagcaccattttgcaaggttgtcttaaattgttcagcaccatattggcgaacatattcatccggatcagcgccactgggcaaaaccaccacactcaattcaagcttggtattttgctgcaacatggtaattgcgcgtttcatcgcttcgattccgggacgatcaccatcataacagacaattaattcccgagcctgttgccctaaaattcccaactgctcagtcgttaaactcgtccccattgaagcgacaccgtttgaaacaccggctgaatacgctgcaatcacatccataaacccttcaaacaggtaaactttgcgttcttggtgaatagcagtctttgctaaatcatagttgaacaaaaccttccgcttgttaaaaatcacggtttcaggactgttcaaatatttgggttgatctggttgtttcaccaaaacccggccagaaaaagcaatcacttcaccttgcgcattccgaatcggaaacatcactcggccggaaaaacgatcatgcagcttgccggtctgagtttcaataaataagccggattgacgtagtgtctggtacggaacttctttattctggaagaatgaaagcattaaatcggtttgatccggtaaatagccaatactaaacgtctcaattaattgatccgtcaagccccgttcgtgtaagtaatctaacgctggttggcccgcttcagtactcattaaaatatgcgtaaagagttcattggcctgacgatagagttgcttaaactgcgtcacttcacttgattcttgaacattttgagtgggtcgataagtctccgctaaactgaagccgacaaagtcagcgatttttgtaacagcttctggaaaactaatctgttccagttccatcaagaacttgaagacattcccaccccgtccgcaagagaaacaatgaaaaatctgtttctcttcactaacggagaatgatggggtcttctcatcgtgaaacggacaaatcccaaataggttattgccgctcttcttgagctggacatactgaccaacaacatccactatgttagtttggctccgaacatcatcaatcacgtcattcggaatctttcccgccattggtctcacctcactattcaattcaaattgtactaagactgtaaaagccgcacctcacaatgaaatgcgacttttaaggattatcagcacaaaaatacactatatatcatagcaccatttaggtacagttgcaaataaatatagcaaactatctcattcgttgtcaaggtcctttttcaaaagtcccattaagatgacaacgtgattatattgcaggtcctttgccgcatagactaacgtgacgttgcccagctcaaggtgctcgtgcactaccttttcaaacgccggccaagctggattagctgcaatttcagcaaggtacttttctttaaaaacgggaaacttagctggctcatgaccaaaccacttgcgtaagtcagtcgttggggtaatttctttcgcccaggtctcaatagcggcacgttcttttgaaatgccgcggggccaaatccgatcgactagaattcggtacccatctgagtctgtcgctgcttcataaacccgtttcatttgtaacatgctattatccccttttgaattgtttatttaacaatcaattcgtttaaatcacctaaggtaagggcgatttgagcgataatcatcaactgtgttaagcgatttcgacgaacagcttcatcttcagccatgaccattgtggcatcaaagtaagcttcgattaatggtcgtagtgtttgtaagatgccgtaattatcagctaatgggttcgtagcaattgtaccacgtaagtcttcgaccgctgtgtaaagtgctttttcagctttattttcgaataatgcaggatcaaccgttaaatcagttgttgcaaagtcaactttttcagcgagtcgtaacacacgtgtcacggcttcaaccgttgccttgaaatctgcatcatcttgatggtctgaaagcactttggcagcttcgaacatcacgactggatcttgactttgattcttcaagacggcatctacgatatcacgccggactttaggccgcatgccgttaaagcgttggcgaacacgatccgttaagaaatcgctgatcgcgtcagcattggttgaccaatcaaggttgaaatcagcttgttgcttaacaatgtcactcatcgcagcttgataatcggccattgggaagtgccagttttggttttctaagatgcggataatcccataagcttgacgacgcaatgcataaggatcgtttgaaccacttggaatcatgcccactgcaaagaaatcagccatactatcgaacttatcagcgattgctaaaaccgcgccgacctttgttgcagggagtgcaccttcagcactaattggcatgtagtgttcgcgaatcgctgtggcagcggctggtgtttcaccttgtaataaggcatatttttcacccatgaccccttgcaattcggcaaattcaccgaccatgccagtcactaagtcaaatttataaatatcacttgcccgttgcaaatcaactaattctgcttctgataaaccaaatttttggcctaagaattgcgcgattaaaccaacacgggtcatcttttcagccagactaccaatcttgtcgtggaatgacacgttttgtaacttcgcaacgttttgttcaatcgttaccttttgatcttcatggtagaagaaatcggcatcttccaaacgcgctgtgaggactttttcgttcccagcaatgacattttccatgaagtcggtgttcccgttgcgaacaccgatgaaaacaggtaataaatcacccgcttggctgcgtgcgtagaagtaacgttggttatccttcattgaggtaatcaacacttcttctggaatttcaagatacttaggatcgaattgcccataaaaagcagttggccattcaactaagttcgtcacttcttctaacaagtttgcgtctaaatcgacttgccaatcgttttcttgggccattgtttcaatctgagtttgaattaagttttggcgtttagcttcatccgcaattacgaattgtgcttccagcgttgcttcgtaatcagttgctttcgccaatgttactgcttgacctaagaaacggtgcccttgtgttgtgcgatcagttgtaacgtttaaaatactgaagtccataatttcatcgtctaataaagcaacaatccagtgaattggacggatatattcaaaatcgtagtctgcccagtgcatccgtgttgggaaagacatcgccataatcacggcttttagttctggcaagattgtttcaacaggtttgccgatgattgatttttcaacatagacgtattcaacaccttttagtgctttaaaagtaatgtcgtcggttgttaaaccttggccgcgaacaaaaccttgcgctgctttactccagttaccttcagcatcaagcgcaattttcttagcggggcctttcgcttcttcgtgaatatcagcttgcttgtccgctaagtcttcaatcaagacggctaaccggcgtggtgttgcataagttttgatggtcccgaatgttaagtgttgttcttctaaaaagtcgcgtacgcgcttttctagttgttggatgctgggcatcacaacgtgggctggcatttcttccaagccaatttctaataagaatggtttagtcattgttaacgacctccgtgtttgattcttgagcatgttttaagagcgggaagccacgtttctcacgttcagcaacgaatgcttgcgcgattgagtgcgccatccggcgaatccgtgacaagtaaccggcccgttctgtaacggaaacggcaccatgggcatccaataggttgaatgtgtggctacatttcaagacatagtcatatgctggatgaacaaggcctaagtcaattaaacgttttgcttctgtttcgtattcatcgaagaatttcaaaagcatgtcttggttactgtcttcaaaagcatattttgaatgttcatattcaggttctttaaaaatatcgccatataacacgccattgccccattcaagttcgaacacattgtcgacatcttggatgtatgaagcaagtcgttcaaccccatatgtgatttcacttgtcacgggatcacattgcaaaccaccgacttgttggaagtacgtgaattgcgtcacttccatcccgtctaaccaaacttcccaaccaacaccggcacaacccattgatgggttttcccagttatcttcgacgaagcggatgtcatgttccaaaggatcgatgcctagagcccgtaaactatccaagtaaaattcttggatgtttaatggggctggtttcatgaccacttggaattggtgatgttggaataaacggttggggttttcgccataccgaccatctgctgggcgccgtgaaggttctacgtaagcggcgttccaaggttctggtccaattgcccgtaagaacgtgtatgggctcattgtgccggcccctttttctgtatcgtaagattgcattagcatacagcctttttcagaccaaaaacgctgtaaggttaaaatcatttcttgcacatttaactttttaaccatttcaattcctcttttccgtattttgcgcataaaaaaagcctatgcgactgttaagtcacatagggacgatttctcgcggttccaccctacttcagctcaaagcgagctgctgcttcattggtatgactccgaaacgccaatccactcaagtcttgttctagttctcactcacctagaatcactgtctgaccatcttaagggacccttttcttcaacgtctattaagttgattactattttagtcgtcttttggcgtgctgtcaatttctgacggcactttttttaattgtggtaattgactatcgaaactgtacatcttatcgatgaattgcttactcttgagcgacaagccaaccgtgtcttggtaaatccggtcgatcatcgtcttaagctccatctgggtcgtttgtttgacattgaccgattggatcttgaataaatcaatcactgaaaacaaccgcagataatagatcgcccgttgactaccgtggaatcgattaacatccaagtgccagtggcgttgacaaagcagcccgccataactctcagaataatcaaacggcaaatcagaacgcccacaaaccgcacagacttgcagttgtggctgcaccccgaagacttgtaacatctgaatctcgatgatgtgcgtaatcattgccgcgtcaaaaccttcatcgattaatgagagtgcctgttcaatcttcggataccaactgccgagcggttcgctatccggaaaaccaacatcgactaagcctaagatataggtcgcataggcatttaaaaacaagtcattgctaatcgattgaaactgactcgccgacttgacattatttaaaaaggataagccatcatcgcgaatgtcgccaccgtactcagcttgggtaaacggcaaaatagccgcactcaagcgaaacttcggtttattcgcaccgcgtaagtaaaacatctttttgccaaagcgatcggtcaaaatcttgaccagcatatctttttctttatagttcttccgatacatcactagaccattaaagtcttcgaatcgatgttccgccattgcttaagcctacaatctctttttattgtaaccaaattcacggaggtattggttattgtcacgccaattcttttgaatcttaacccagagcttcaagttgactttttcgccaagtaaagcttcaatttcgcgacgtgacctaatcccgatttctttgataatggagcccttttgaccgatgataatccgtttttgaccatcacgttcaacaatgatattcgcttcaatctggagcttatcattgacgcggtctttcatccgttccacaaccacggcaacagaatggggcacttcttcatgcgttaattcaagaattttttcccgaattaattcaccaacaacgaaatattctgggtgatccgttaattgatcttctggatagtattgggggccttctgggagtgtttgttccaattcttttaacatttcagggacattgttaccttctaatgcagagattgggtaaacccctttgaagtccaattcatgccgatattgttcaatcattggtaataaatcgtctgggtggatcgcgtcaattttgttaacaaccaaataaacgggtttcttgacgttctttaattggtccatgatgtattgatccccaggcccttttttatcaatcccactaatcatgaataaaatcgcatcgacttcgttaaacgtcgaaagcgctgcttgatccatgtattcgtctaattcgttatgtggtttatgaatccctggtgtatcaacgaagacgatttgtgcattgtcatccgtgtagatcccttgaattttgttccgagtcgtttgtgcttttgatgacatgatggcgattttctcaccgatcattcgattcataaaagttgatttaccaacatttggtcggccaacaatggccacaaagcctgagcgatatgtttctgacataatagtccccttttagttaaatatggcgtgtccaaagacaatggcgccaatcaatagcgctaaaattgcgctgattaagacactcgcagcactgatatctttaatctttttagcgagtggatggtactgatggtcaaccaataaatcaaccaagtgttccattaccgtattccaaaactcagcaatgaatacaatgaagatggcagaaataatcgctaaccaatctaaataatgtaactgacaataaacaccgaaagcaatcgcaatgagtgcaaaccaggcatcacgccgtaaattagcctcagttttaaaggcggtccataatccaccgagtgcgtggcgtagtgactgccaaaaatgtttattcttgcccgtttgtggttttttaccgttgtaatccaaattcatcgaggatcttctcctgtaatggaatcatttgtgcttcatcttcactatgaatgtgatcataaccatttaagtgtaagaagccgtgaaccattgtgtaccctaattcacgttcaaatgaatgtccataagtttcagcttgttcagctgctttttctaatgaaacaaacaaatcaccgatattcttgggaatgtcgaatagttcttcaaagttggctggtaatccttcttcttcaggatcttcttcgattgcaaaactgatgacatcagtcgcacggtcagtatcgcggtattccttgttaatttggcgaatgcgttcgttcgtcacaaacgtgacagacatttctgtgtcttcaggtaaatctaattgttgcccggcatattctaaaatatccgtgaccagttttacgtttgcttctgcaactacttttgtttcatcgataatttggatatccattcaagtgttcctactttctcatcttttcaatcgccgcataggcgttaataatcttagcaacaactgggtgccgtaccacatcttctgaactgaactgtacgaaagcaatcttaggaatatcgtgcaaaatatgttcagcttgcaccaagccgctcattgttttcttaggtaagtcaatctggctaatatcgccgttgacaatcatcttcgagttaaacccaagtcgcgttaagaacatcttcatctgagcaggcgttgtattctgggcttcgtccaaaataacgaaagcttcttctagtgttcggccacgcatatacgcaagcggtgcaatctcaatgacaccacgctctaacaaacgttcagtatgttctttacccaaaacggcatacaatgcatcataaatcggtcgtaaataagggtccaccttttcctttagatcacctggtaaaaaacctaaactctcaccagcttcaaccgcaggacgcgttaaaatgatccgttcgactaatccttgtttcaacgccgcaacggccatgacaacggctaagaatgttttccccgttccggcggggccaatcccaaacgtgacatcgttttgacgaatcgcattcacgtattgacgttgaccgaatgtcttcacgcgaatatgctgccctttacgatccttgattaatggctccgtgtaaagttcttggaaaccagcaatcgtgcctttttgggccatcttcgtcgcactcaccacatcactactattgagcttaatgccatgttgtaacagcgccactaagttttctaaaacagaagcggcttggtcaactgctggttgttcgccgcgaatggtaatatgctcgtcaaacgcaatcagttcgacagataagctttcctcgatgatttttaaaaaagtatcgtgtgtgcccattaaagcggccgctaaatttggcgttgccaattgaaataaacgctcatctgtttcagccaacaaagataactccttccagagtgtgactgcaactgattctgagtattatctagcccagcaaataaacgactttagtcgattattaactacacgtcgtaaagtgaagaatcaagttgcaaccgcacgtttcaacttcatttgttttagaatgaaaactaccatcattctatcacaaacaacaaccgttttaaaagtagccagccgcgctaattcacgaatttatggtcaattatcaaaatctgaattaacgaccataaaaaaaagcgggactccccagaggaagtcccgcctaaaattaacttaattttgatttaacgacttgattgaccatagcgccatcagctcgtcctttgaccttaggcatgacatattgcatcaccttgccaaagtcagccttacttgtcgcaccagtagcctgcattgcttcgtcaacaatggtgaccactgctgcttcatctagctgctctggtaaataagcttgtacgatttcaatttctgcttttgtttgttcagcgagatctgcacgatcgcccttttcaaactcagctaatgaatccttacgttgcttaagttgtgatgatagtacacttaattcttcgtcagaagataagtcttgccccgcactaattttggcgttagttaaagcggtctttaaactccgaataacagctaatcgcaacttatctttggccttcatcgccgttttcaaatcagaacttagttgttcaagtaaactcattcaatcatttcctttatctaagaaattagaacttcttacgttttcttgcagcttctgatttcaacttacgttttacacttggtttctcgtaaaattcacgtttacgatattcttgtattgtaccagcttttgatacggaacgcttgaagcgacgaagagcatcatctagagattcgttactgcgaacgactgtcttgcccatatgatatccctcccctcgcgtgctaagtataaccgtttacgttcgttaaaaatttaacttcacgtgaaccgttctttgctattatagcgaatgttgaaaatacggtcaataacccacagggaattaattgaatattttttcaaatctagcgattttttcgataattatggtatgatagcgctataaaagtgaataaaggagcatgccttatgccagaatctaaaccattaaccgtttttgtgctttcggactcagtcggccaaaccgccctccaattagcacaagcagcgctcgcccaatttccggacgttaaacctgatctcgtccgcttccccttcgttcacacgcaagagaaactcatggacgtcttaagcaaagcggttcctgaagaaacaattgtggtccatacattagccactaacggtctttctgaaatcgccgaaacctattgccaagcgaaaaaaattgccagtttcgacatgatgtcaccaatgacacaaatgattactgctaaaaccaacagcacgccaactggtgaagctggggcactacatcatttgaacgatcgttattttgatcgcatttcagcgatggaatttgctgttatgtacgatgatggtaaagacccccacggtttcttagaagcagatatcgtgttgctcggtgtttctagaacgtctaagacgccgctgtcgctctttttagccaatcggaatatcaaggttgccaacttaccaatcgtgccacaagcgcacattccagacgaaatctggcgggttgatcctaagaaaattatcggcctgatgaatacaccagaagtcctcaataacattcgccgggaacggatgattgcttatgggttaaatcctgataccacttattcagacatggacgaaattaaagctgaattggctttcgcccaagacctgtatgataagattggttgccaagtgattaatgttgccaaccgttcgatcgaagaaactgccacaattattcttgaacgcatgggcctcgattttgcgggcagtgcgaacgatcacgtcaattaaaaaaagcgttcaaatctgaaatcgatttgaacgcttttttaatttgttaaggtaaacaccgtatcaggttatgctgacaaatttgtccaaaaattcggattaaatttgcaatctacccaataaacaaattaactgtacccaacgcagtggcggttacatcatccgcgtcatttcgctctgatgataactcggctcgctgcagtgctagttgctcatcaagccgcagttgttcctgctcttgaatttgaaataatcgattcttcggcaatcgccgaccgacaaaggcgtgggcaatgaaaccgatgattggcaagaacaccagcaccagtagccaggcccaggtcgctgaaatatctcgcggttcacggaacacagtaatgaacgccaacaccgcgtttacatagataattgtttcaaaaataaaatgtgcccagttcatctggattggtcctccaatacgcataaatgctaatttcatcttactcatctttaggaagcaacgcgacccccgtattgtcaatctaagtgcaacagtttctagtctaatcctataagtggtacacagcttagagttccggcatcagttccgccgcactccggtagcccaagatacgacgaggccggctgttgagtgcgtcctggaagctctgaatatcaatgatgtcgtaatggtggagtgagcgacctttcggaataaactctcgtagaaggccgttctggttctcatttgttccgcgctcccatggtgagtacggatgagcaaagtagacatcagttccttctactgaatctagttgtgcgaactcactgccgttatcaaaggtgatggtggtgaagtattccgcaccgtaatcatcaatgatggactgaagtcccaccttacaggtacttgctttgtagttagcgagcttgatgatgatttcgaagcgactcatccgctctgtcaaaaccagcaacgcaggttcgctatcaacgcgcttacctttcactaaatctccttcccaatggcccccttgccgacggtcttgaacttcaatgggtctttcatcaatcgaggtaccaagcttcgtcttattggtgcgggtatgggaatggcttcgtttaattcgcaagttggatttgcgcggtaagtcgtgggtccgtagttcgaatctaccggcctcaatatcccggtaaaccgttggtgttgaaggaacaacctcgtctgcgtgttcccgtttgaaggtgtgcacgaagctgtccacactgtgtacgcgtggacgttgcttgatggcagcggcacaggcggcgtagaactcggggttcttctcaagcatcgtcttggggcgacaccactcccgccgctgagcgtgcagataagctgccgtatcagcaaagtaaatcaacgctaccttatgcccgggaattcgctgtagaacgaagccacgagtgatctcacgcgaaatagtactacgagagcggttgagttcgcgggcaatccgtgcttgggagaatccctgattgagcagagtttcaatgcgaacgcgatcaaaatttgatagttgttggtaagccttagagctggtacgcttgatgttggtcatgatgtgcctttcttatgtgcttggttgcttataagaataggtcatcatggcctttttggtctatttaattatgtgttgcacttagattgtaaacgcgggtcttgaatataaatagcaaaattgccacaatcacaatcaacccatccatcattcttagaccagcaattgtggataactgtgtcatccgactagttaccaagatagtttctgcgattacgatcaagacttttgagaacttagcccatatcgttgtcactgcggaaacattcatcaatgcgtcaacagacgtttgatagacgactgcagcttgttgcaacaataaaacatccggcagattgcgccctgtctcccagttagaaatagcctgacgtgaaacatttagttgtttagcagcctcagactgtgtgagccgtaattgattacgtgccctctttaaattggccgagagaatttcaccttttgtttgcatcatcttcactcctaaaaagtaccagtagcttgcttcattgacgagcaaggaacgcttgcatccgcattagcacagtgtttgtagaccaaaataaaatcataattgctaagttatacattagcattgatgtgaatagacttgtaccatttttttatctacgagtatctggtatttcaaagaaattgtctactatctcagcgacggggccgtcaacagtaagcacagtaactaggcggctgcatttgaagcttgaacagaaagctttgaacaatacttttacacacacagtaattggtgataaattatactcaaccaaacgaacaactactggaggtgcattcatgaaacccgaaatttctaaagatatcattcggggacacacgacgaccatcattcttaatattcttagccagggcgacagttacggttatgaaattgctaaggccgtccgcgaactgagccacgatgcatatgaattaaacgaagccactttatacactgcttttcgccgcatggaacgcaatggtgatatcgaaagctattggggcgacgagactcatggtggtcgccgaaaatactataaactaaccgaacaaggtacccgcctactcgcaaaaaacgtcgcagactgggcgtttgcaaaaaagattattgatgacctgattaccgggaggattgatgacaatggacacaattgatacgatggttaaccggcgtttggatgaaacgtttaaggcttatcctgacacggaagaaatgcatgaattacgtgaagagttggctgctgatttaagtgaggtcgcccacgacaatgaaaaaaaaaggcgccaccatcacggacgccgtcaacagggcttttgaaggattaggcaatctcgacgacttagtggatgaaattaacgccgaaaaaaatgctactgatcaagatactcattccgacgatgccaaacaaacgtcacatgagcatgcctacaatcacggtcaccacatcgatattgctgatggcaaggtaattatcgatggtggtaaggtgctcatcatcgatgacaatggtattaaagttaacggtggcaaagcggtaaatattgatagcgatggcatcaacatcaataacggtacgtttactgtcacaaacgacggtattcggatgggtaatcttgtaatcgacaatcgtggcattcacacggacggcggcaaaacagttgccggttcgtttgcggaaaaaaagcagcaaccacataacgacaagttcgatccccatgccaatgacgacacattttcaaacttcgatcagcaatttaatgaacaagaaccggtcgatactgaaatctacgtggacagtttagtgcttgccaacgaacaacaattttctgccgatcaagttcagcgaatcgactttaagtatgctgacagtagcgtccgaattttaagcaatcccgatgatgatcacattatcttccgggaatacatgaaccgcgctaatgacagctaccttgcacaaactaagttggagaatggtaccctgtcaattcataacggatcacggcctcacctgttaccactgcgggttcgtgttcagctactcattccagcatcctttgcaggtgatttactggttaacagtgcctcaggtagcgttaatttcagccataccggcgctctgaaccaggttcgtttggaggcaaacagtggttccattcgcattaatggtgcccactttaaggatttagatgtcaacgcatccgctggttccgttcgcattaagcaaaccactgttgcggggctattacgtgctcgtgctcatagcggttcaattcgcttggctgacactacggttgctaagttcgatgtggactcacactcaggttctgtccgcggcactgacttgaatggtgctggtgcgttcaacgccaattcagggtcaattagcctaagtttcagtgatctcactggcaaccttgataccacagcgcactccagttcaatcaaactagaattcgctaagggcatcgagtataactttgacttggacgccaaaagtggttctatcaccggtcccgataacgctatctacgatcacaatacgactaacttcaaagatggtgcagttggtgatgacgacccacatttctatgtcaccgcagcaacaaagtccagttcgatccatgtttcttagtctcattaactggttaattgtttcaacatcatgtaatcaaagtaacctaaaacatcacgctgatattaaaaaatcagcgtgatgttttttgcactttatttagttacttcaggaacacgcactaaatcacgtttgatcagttcctgtgcgatttgaaccgcattcaatgccgcccctttaagcaggttatcagcaacgacccacatgtgataagctcctggattttcccggtctgctcgcatccggccgacaaacgtttcgccatgaccagctgcgttaatcggttgcggataaacttggtgtgctggatcatcctgcaatacgacaccctttgaatgagccaatagagcctgcatatctggtacggctggtgtttggttcgtttcaaaataaacactttcaccatggccaattggtacgggcacgcggacacaggttgcagataccttaagttccgtgtcgttcatgtcaccacgtaaaatctttttagtttcgtgaatcatcttccattcttcgtgcgtgaagccatcgtcctcaaagacatcaatctgtggcaacaagttaaacgccaatggatagtgatgttcagcacccttgacaggtaaaatagcagccgtctcctcttcgccttcatgacgttgttgggcctcatcgaataactcgttcattgcccgttgaccagcaccagaagccgcttgataagtcgaaactaggacttgatgcaacttatactggcggtcaattggcgccaacgcaacaaccatttgaatggtactgcagtttggattggcaacaataccatgatgctgactcaacatctctggattcacttcaggcacgaccaatggtacatctggctccatccgaaaggcactggtgttatcgacacaaacggctcctgccttcaccgctgctggtagcaatgccttggaaactgaaccgccagctgacgacaagacgatatcgatacctttaaacgagtccgttgtggcttcttcgatcgtataagattggccacgaaaggtgcgtgtttgaccagctgaacgtgctgatgccaacagcaccaatcgatcaaccgcgatatcagacttttccaattgttgtaacatccgtgtgccaactgcaccagtaacaccaagaattgcgacattaaatgattgcattaaattacttcctttcaagtttcactccactcgatcatttagttaagccgaaacatcaaccgataatttgttggcacgataggctgccagtcgtttgacagcttcctgcaatttgtccatgtcggcggcgtatgacaaccgaacgtggccttcaccaccaggtccgaaacagctgcctggaacaacggctacctttgcctgttgagcgaccttaagtgcaaaagttcggtcatcttgttcctcatccgccggtattttggcaaacacataaaaagcgccatttggttgatccgtggtaaagcccagttgattgagtgcctgtaccagaaaatcacgacgttcgtgatactgagccttcatggctgccgtgtctgctgccccatgttgcaaagcatcagtggccgccgccatcattggtgttggtgcggtggtaaccaaggcgccatgtagtttggcaatatgctgggttagtgcagccggtgccgctaagtaaccaacccggtaaccagtcatggcaaacgtcttggaaacgccattaatcacgattgtccgctccggtagcaatgtggaaatggatacatgaggctggtcgtaggctaattcacaatagatttcatcagccaacacgagcaacttatgcttacgaatcactgcggccaatgcttgcaactgcgagtctgtgtaagtgacaccagttggattggttggataattcaaaaccagcatctttgctcgcggatgagcagccaatgtagccgttagccgagccggtgttaatacatagtcatctgctgaggtatcaaccaacaccggcgtagcgccatcaatctgggcagtcgtaatgtacaacggaaaaatgggcgttggaataatcacctcgtcgcccgctcccaaaacagttcccatcgcggccgcaattgcttctgtggcacccactgttaccaatatttccgcttggggatcgtaagtaacctgattcaatttagttaagtatgtactaatcgcttctcgtagctctggtaacccggcagccggtgcgtaatgagagcgattctgattgattgcatcgatggtcgcctgcttaacatggtctggcgcgttaaaatctggttcaccaagcgttaatttcaggatgccaggaatatcctttatttgattatcaaactgacgaatcgctgatggcacaattttgtcaaacacgggccgtgtcatccccgttaactgagcttctaattctggcatatgcattctcctttgaccgtatcaattcgcggtacgacgctaatctaaaacctgttccaaaccaacctttaattctgttaatgtcgtcactttgctcaatgctagcttgacgccaaccataaatgactcacgatcatacgtgtcctgccgaatcgtcaacgcttcgcccgttccgccaaacaacacttgttcatgtgctagataaccaggcaaccggactgcatgaatcggaacgttgtcgacaatccccccacgcacgccatccacgctgctttcagtatggtctggatctggctgttgttgccgaccagcggcgattgcatgggcagtagcaacggccgtaccagatggtgcatcccgtttatcggcatggtgcatttcaataatctccgcgttcggaaaatacttagccgcctgtttagcaaactgggttagtaacaccgctgacaatccaaagttgggaacgatcaacccacctagatgagtggaagcagctaacgcctgcaatgattttatttgtgatgtcgttaagccactcgtgccaaccaatgggactaacccgtgttgcaaggctacttcaacgttgtgttcaaccacagttggcgttgtaaagtctaaccaaacgtccgcctcaggcaactcgtcttccgtagtagcaacgacaacttggcttggcaaatgtgggtcattcccgtccgttagtgcagcatgaggatcaaacacaccagtcaattcaaaccgctcatcgtttaaaattgactggcagctagcagtccccatactgccacgaaagccagcgacaataacacgaatctttgactcactcattttctataccgcctccgtgttttctgccaacggaatatcgcttagttggtgaacgcctaagcgttgtgccaaaatggtttgctcagtgtcattcagaggaacgattggcaaacgtgggttaccaactggtagtccctgcgcatttaaaacggccttgactggtgatggtgatggatatatgaataacgcagccatctttggcatcaagtcacgttgaatctgaccggcacgtgcaacattaccttgttctagtgcgtcgtattcctgtcgcatcgctggaccatatacgtgactggcaacggaaataacgccagttccacccagtgccttcactaataacgcttgggcatcttcaccactgtaaacggcaaaacctgtcggcgcatcattaattaacgccgccaaatccgcatcactaccacactgtttaacaccgctaatgtttggcacttgtgcaagctggagaatcgtttcgttcgtcatgttgacgccagttcggccgggaatgttgtaaatgacaattggcttagtagcagcttgagcaaccgctgtaaaatgggcaatcatcccccgttgattaggtttgttgtaataaggaacaacgaccaacgttgcatcaatcccgtcaatcgcatcgacttcctgattaagggcaattgtcgcagctgtattattactgcctgtcccagcgataacgacaccacgaccggccacaatctgtgcaaaacgggtatagagttcaatcttttcttcgtgcgttagcgttggtgtctcacctgtcgtcccaccgatgacaaacccgcgtgaaccagtttcaatgagcatatttgttaatcgcgttaatgcctcgaaatcaatatgatcatcttcggtaaacggtgtgatgattgctgttaataaatcgttttgttcaaacattttaaattcctccctattggtgagaactattcggaaaaccaccgaatcatttgttttgcttcttattgctcggattcaaccgaagtcgagcatcactctcttgtcatccgatcctccaaaaactcggtaatggcggtgacacccttgctaatagcggactcgtccggcgtcattttggcagagtgcaacggtgcgtgaccgtccacccctaaccaaaacatcgtgccaggaaattgatgcagcatatatccgaagtcctcgccggtcatggccggtgccgtttcaacaaagtccacatcgggtgcacttttcataaattgaatgaacgggatcgtcaactgcggattgttttctaccggcaagtagccgccctgattcagttcaacattgacttcacactcgaaactcgtagcgataccattagcgattgcctgtaatcgctgatcaatgtgttcaatcatcgcttgcgttagtccgcgaatggtcccttctagcctggcacggccagcaatgacgttacggatactaccggcattcagtttgccaaacgtcaccacgccgctttcaattgggtcaacgcttctagagacaacggtctgcgcttgcatgataaagctggcgcaggcaactaccatgtcgttagccaaatgcggataagccgcatgcccgcccttgccaacaaagtccacgttaatttctgtcgtaccagcaaataacgtgccattgcggcatccaatcacgcctgcaggcagctccggattgacgtgcaagccataaaactcatctggtcgccattcgccagcaaaggcgccagcctcaacggccaacttgccgccgttgtcgttttcctcagccggttgaaagaaaaacaataagtcatcttttggctgatgattggcaaaataattgagcacccctagggccaccgtcatgtgaatatcatgcccacaagcatgcatcttgccgggatttgtcgacgtatatggcaatccagtcgcttctgtaactggcaaggcatcaatatcagtgcggtatccaatacaccgttgcggctggcttccttgaactttaaccatcaaggccgttggcaaacttgggatgtgatgcatggtcaaccattgttgaggcatcgcttcaataacttgccgcagatatgcagctgtttgagtttcatgaagtgccaactctggaatttggtgcaagtgacggcgaatatgaattaaatctaacgtttcagacatgcagtaccagctttctttcagtcaaacgtgctagagctttcgtaacgaatcctgaagtttcgttttagcctgcgtttttgcatcgtttactttaatcaccttagctggaacaccggcaacaacggtattggctggcacatcctcagttactacagcaccagcaccaaccaccgcgtgttcaccgacatgaacgccctcgataactactgcattggccccaatcaacacatcatcatcgatgcgcacgggttctgcagaagccggttcgattacaccagctagcaccgcgccggctccgatatgacaatgtttgccaacgattgcacggccaccaagtacggcacccatatcaatcatggaatcagcgccaatctcagcgccgatgttgatcagcgcacccatcataatgacagcgtgatcaccaaccactacttgaccacgaatgatggcacctggttcgatgcgggcgttaacttcacgcgcatctaataacggaacagctgaattagtagcattggtttccacatgcgtttgcacaatcacatcttggtgtgattcaagaaatggtttcactaccggccaactcccaaacaacgtccccgtgtgatcttccataaacgcttcaatgccatctggaatcgtcagttgacgtaagtgatcgccactaacagtgaccttaaccggcgtttgtttcttagcagtcgctatcgtatgaataatctgtgtcgcatctaattctgccatttgaatcctccttaatgattgcgttaccttacagggcttcggtgccactcttcctaaacgtgcacctgtccgctcaaggccctgtgcacaacccaaagctgtcaccccacaagcaaagtgcgcttgcacgctgtcacctttacgttgttgctcgagccttaccgagcttcggcggcactcttcttaaaatcctcatccaatgcgagcatgtcgcggatggtttcacgccggacgacgatactggcttgtttgtgatcgataaaaatgacggctggacgtggattgcgattatagttgctggccatcgaataaccgtaggcaccagtagctaagagggcaatcacatcgcccgttttcgtaaccggcaacgtcgcttcttttactagaatgtcgccggactcacaatatttaccgacaatatggatggtttctttagacgaatcttccacatgattggccaatactggttcgtactcagcctgatacagcgctggtcgaatgttatcccccataccgccgtcaacagccacgtaaggcaataagctggggacgcgtttgtttgcgccaacccgatataaattgattcctgccgggccaaccaacgaccggccaggttcaatccaaatctccggcatttctaagtgatgattacctaacctggcttcaatcgtcgttaacacggtgtcaagctgggcctccggtgattgtggatcgtcaccttccacatatttaatgccgaacccaccgcctagatttagcacttgggccgaatagccaaacgcctcatgccaatgggtcaacagttcaatcaatttctcggctgccattacaaagccggtactctcaaaaatttgtgatccaatatgtgcatgaacgccacgaacatttagatgatcatccgctaaagcctctttcagtgcctgatccgcttgaccagaaccgatgtcgaaaccaaacttactatctacttgacccgtttgaatgtactgatgcgtatgagcactaacgccgggggtcacccgaatttgaatcgcaatgttttcgtcccgttcctgtagcaaacgttgtaatagatgaagctcaacgaaattatcaacaataatcgtgccaagatgatgatccagtgccattgtcagttcatccacagacttattattcccgtgaaaactcagtcgagatgacggaaaaccggccgcaaacgccgttgccatttcacctgctgacacaacgtccgcatgtacaccgagtggcgccaacagctgatagattcccttcacgcagaaggccttagacgcgtaactcacgacgccatcaattcggtggttagcaaacgtctgttgaaaggccttcacctgacgaacgatatcctgtgtatcgtaagcaaccagcggtgtgtcaaactgctctgctattttgacggtgtccataccaccgatcattaaatgatttgtcgttgagtcaactgttgttgtcatttttttgctccttttagtttttagaagttattttggttgtacacattgtctatgcgcccgacgtcctttcggattggtctgaagtgtgccaatgttgacaaccgaaagcacagaaacatagcacgaaaaaagggggctcatttgcataggtgcgtacgcaaaagagtcccgaaaataaattcatttcgtttctgaatgtcgtaagcgccccgcgatgaatttttcatcacgacagtttgttgattattcgtcaacatcccagccaaagcgatggtcaatcgtccagcttcggcaaccgcccctttcatcagtttctatgtcgtgacccgactccgctgattactcttgttggttgcaacctcttttcacatttaattttaatgagtatatcgctcttttcattacccgtcaagtccccatttaaattttatgttcccaagtaaagcgctgtaccaacgcgtttacatttattttcatttagctattgtaattgaaaactaattcgctataattgtcagtaatcatagaagaggttgcgaagattaaaagtaactaagagtaaaacgacgaggttaacgacgcttagtgaaaggatgattcgccgaaactttgactgactcgtctcagttagggttgggactcgggttaacagcccaaggactgtcgcaactaacaaaaaagttgcggggcgctatctacgaccatacataaccggtactatatcgattacgttcgattagactaagcgcacccaatgacctcgttaaacaaagtcattgggtgcgctttttaaatgtaatcgtgggtgtgaatgatttcagtgtcgattccccttctaacatcaaaaacaatggtctgtttggacaaacaaccgtggtaagcgaggttaggatcgatgaaagtaattaagtttggtggcagttctttggcagatgcgacgcattttagtgacgtaatgcagattttacgaatggataggcaacgccgcgtggttgttgtttcagcacccggcaaacgaaatgagaacgatgaaaaagttaccgatttactgattgactacgcacgtgcgcatggtaaaacacaacagtcgatcggtcagcaaatcatcgacagatatcaagaaatcgcagcagcgtttaatatttcggcagctcaatttaaaccattggcggaccaaattttggccctaccaacgacatcatttcgtggcccagcctttagaatggctgcgtttaaggcccacggcgaaaagttaaacgcccagttactggcgctggtgttaaatacacaaggattaagtgctcgttacgttgacccacacgaactcggcttaattgccacgcaggagccaaacaacgcgaccattttatctcagacatacacacacctggccgttgcccgtcaggagcttctagcggaagacaaactgtgggtcgttcctggtttctttgcctatacaaccggcggtcaactggtaaccttttcccgtggtggctcagatatcacaggtgccattcttgctcgtggtttgcatgcgactgaatacgagaactttacggatgtcgactccatttacgctgccaatcctaacgttgtcgctaacccagcacccattactaagatgagctacgtcgaaatgcgggaactttcatatgccggtttctcagtttttcacgatgaggcaatcattccagccattgaaggtcaggttcccatttgcgttaagaataccaaccatcctagtgcgccaggaacactgattgtaccaacgaatcaatcgcagcctaagcgattaattacgggggtagccagttccaaacgttttgcagcgctctacctgcatcgttatctattgaaccgggaagttggcttcacattaaagttactcaaaatcctcttccgctaccacatcagctacgaacatatgccttcaggaattgacgatttaacgatcatctttgatcgcaatcaaattccgacagatgtcctccctcgtttgctagcagatatcaaagaaacattgcaacccgatcgtcttcagtggatcgatgattacgcgattttgatggtggttggcgaaggcatgcgcaatcaggtcggcgtcattgaccggatcctgcacccactagccactcatcatatcggcgttcaaatgatcaaccaaggggcgtcacggatttccatcatgattggtgttcgggaagcgcaggctgatgacgctgttcgcctcatctacaatgatttctttaaccaaccagttagcttgccacttcgtcaaccagcacaggaggtcactcatggttaatttgattcgggttcatggttcggaaaatagtttttacctgcttgatcaacggcaacttaaacatgcactcaccacagccgaactcagtcgtttggcacaacaagtcaacgacacagcaccagcaagtctgggcgaagtagatggtgtcctggtcgtcagtgacagtcagcattccaacgcaatcggccggatgcaggttttcaaccgcgatggcagccaagcaagcatgtgtggcaacggcttacgaaccgtcagccgctatctcgcagaacaaacgcaccaaacggatttccaagttgaaacagatgtggctgatttaccagttcatcaagtcacgccgtttgcgccagatgtgcctgcattcagtgtcagcatccaacccgtcagtttcgatgcgacttcgattggcttacatcaaatcccgacaacaccacttttaaatcaaaacagcttgccatttgcaacaaattccactgcaaacttttccgctgtggcagtgccaaacccacatttgattagtctcacagaccataaccatcctaatgccttaacaaccgccttcctagggcaactcggacaacaattaaatggtcaaaacccgtggttccctgacggcgtcaatgtcagctttggttgggaaatcaacgacactaccctctttgtgcggacgtttgaacgcggcgttggttttacaaacgcctgtggtactggcatgtcggccacatcgctaatttgggtactgacccacccagccgctcagtttgaccaactcctgaccatttataatccaggcgggatggttcaaacgcgtgtccatcatcaaaacgccgcgtacactatcgacctaatcggcaacgcgaccttcactgaccatttgcgtttgagcgaggctgacttgcacgccgggaacctcgccagtgcagaagtcgcggcaacacaagaagagaccgcctatcatcaattcgtatcacagttaccgcattggtaatttggctatgtccgcccaactgcagacgaacactaagtttgctaaagagggaccggtttcgcagtctagctacgaaaccggtccctttctattgtgatagttattctctacaaaattggtgacaataggcgtgaaaatatttgtttgaacttacgccaatacgattgttgggcgaacgtctcgtaagtcgtcagctcactgacgcgcatatcagcctcaaacaacttagccaactctgcggtaactttaggatcgtacaggaatgcattgacctcaaagtttagtttgaaactacgaaaatctaagtttgccgatccaacagatgcgactccgtcatcaacgaccattgttttagaatggataaaaccgttgcgatatttgaagatttttaccccgttacgagacaactgcttcgcgtaatactcggttgcccggtacacaaacgcatgatccggcttgcttggaatcataatgcggacatccacgccactgccagccgctactcgaagtgcatcaaggacagagtcatctggaattaagtacagcgactgaatccacagccgtttgcgtgctgagttaatcaatcgtaagtagcccatcttaatctgctctttatcagaatcgggaccagatgacacgatctgcatgttggtttcgcccttcaccttagtgatatggaagaaatcattggtaacgtttagtggtttggtacgactggtagcattccaatcacggataaagcgtgactgaagcccgtaaacgccagccccaacgatgcgaagatgcgtatcacgccagtaaccaaacttttctttacgacctaaatactgatcgccgacgttaaaaccaccggtatagccaatagctccgtcaatcacaacaattttacggtgatcacggaagttcaaccggaaatccactatcgcactgcgcgtttgcaggaagggatatgcttccccaccagaggcccgtaatggatcatagaatttgggccgaacacccatcgaaccccatgaatcatataatacccgcacagccacgccggcttccgctttacgaatcagcaaacgcagcaattcgttaccgatgtcatcgttatagatcgtgtaaaactcgatatgaatgctctgtttagcctgctcaatgtcttcaaacatctggtggaacagcactttcccatcagaaataatgtgcacccggttgttgcgagttaaaaaggcttgatcagactcaaaattttatattatttcatccggcaacttgacaggaccctagtacatagcttgagtggtggttctttttttattttagacattagttcatttaattaggaattcagatagggaaatatactgaaatgaacgtaactgataaagtcggtcaagagtggcaatttatactaatttttgaaattacagataaagaagctaatcagggcaccgttgatttgaagaaagcaattaactgaggtgtcttactttaattgcctagcttgtttagttgacccacttgtctagaaatgttaaattgattctattcaataaaggcgttgattgttgggaggcgatgaaagtggatgaacgcattacagaataccgggatgcggtttatgagcaggtggtcaaagtcgggaagtcgttagggaacgtgacgcgtctacaactgttgaacattcttgcgcaaggccccaaaacggtggaagtcttagccagtacagtcggcttaagtgtcgctaccgtttcacggaacctgcaaattttgaaacaaacaaacttagtggcgattgaacgcgagaagaattttgttacttatcgtttaaattcagaacgggtcaaacaattggtaaccctcttggttgatgtctgcgaagaaactttgccagagatgacgattttggaaaaaacactcgcgcaagaaacaggtgcccccgaagcgttaactggtgacgcattgaaaacgaaattaatggcagacgatgtgtgtttgattgatttgcgtcccgcagatgagtttgcaagtcaacacttaccaggggcacgcaatgtgccgtatgatcagttggatcaacgattagctgagctccccaaggataaagaagtggtggtttattgtcgtggtcgtctatgtgcttacgccaatgttgccagtcaacaactacaagctgctgggtttaaagtggcaacgtttaatcaatcagtgtgggaatggtcgcgagttatgaccgaaacggaataagatgaagcgtcctttttgacggcacgtcccaatggtggtatattatgagtaattcaatgaaatcgttgaatgattttcttgaaaagaaaggtgatcgcaatggcaacacaaattctaactgaagcaaactttaaagatgaagttcaagaaggggtcacattagtcgatttctgggcaacatggtgcccaccatgtcggatgcaaggcccaattgtcgaagaactagccgacgattacgcgggtaaagctaaaatcgccaaagttgacgttgatcacaaccaaaacttggcggctgaattcggcatccaatcaattccaaccttgttggtcatgaaagatggccaattagtgcaacaaatggttgggttacaacggaaagaaacattagcacaagaaatcaatactgccttagcttaaaaatagcttgaaggcgtatcacgattaaataataacatcatccgataagctcttaagtagggcatatattaggtgatgtttttttgtgttgttattttaagtaatccagcataacggctttaaagaagtcgatgtgtttgaggtacatttcttcatcaacatattcgtcaatcatgtggctagtatcattgccggggccgacaactgccacaggtaagtcaggattgtgcttagcaaggtgggcggcgtcggtaccgccagcaacgtgcatcagtggataagcttgggataacttttgtgccccgattttttgaacagcttgaatgaatggtgcttgtggattgctcttaacgggtggttggttattaatgacggtcaattccagattcatgtctacctgttgattgagttccgcaatgatggtattgaggtcagcaatcacttggtcgccagttaaggcgggggttgtacgaacccgacaagtaagttctgtgtgaccggggaccgaattaatttgttcaccaccgttgattaaggttgtgacaggcacgatatcgccgaggacatcatcaataggatgtttctgatcgaagtattgtttttgccgattgtagtaggcaagcaaatgatcaattgcgttaataccgagtgcgggcattgaactgtgcgcggttttaccagttgccgtcactttaaaatcaagggaaccgttatgggcgaaaattaagaaatgttgttcattggtttgattagccgcaaggagtttttgggccatttctgtggggaatttatcggggttatttgccaaggcttgtttatcaacgccagatggttcggcaactaataaggctgttaaatcatcggcatagccttgagcggttaaagtttgcgcaccagtttcgttcttttcttcatcgacggttgcgagtagtttgatttggtcgtttaaaggaacatgttcatcgtgtaattcgatcattgcaatcacaagcgcagccagaccagacttcatgtcggttgcgcctcgaccgaagagtttaccatcgcgagcggttagagtgaagggattactcgtccatttgctgcgatcaccgatgctgacgacgtccatatgaccagtgacaccgaggactttgtcggttgcttcgcctagataggccactaagttttcgcggcctggtttagaagccactttttcagtatggataccatgttgtgcgaatagatcggctaagtagtcggcaatcacaccttctgcttggtctgttgtatcaattgagaccagtttttctaaaattgcgattttttcagttttttccatcatcaaaagatctccagataagattcaatatgcattatagagcccctattttgggaaagcaacggacataaattaagcaatttcgcaaatcaagtgggttaaaaaagcctgaccggcgcggtttattcgttaaacccgtgcatatcaaacagaacgcatggattggtgccggcgcaacgattttaccgggggtgacggtcggtgagaatgcgattgtcgctgctaacgccacggtcaccaaagatgtaccagacaatatgattgttgccggaacgccagcgaaagtcatgcgtcaaatcaaattagaaaaggagttttaacatgtcaattcaaaataaagtcgtgatcattacaggtgcctcatcagggattagggcagcaactgccaaattattagcaagcaaaggggctaaggttgttttagcagctcgtcgtgaagatcgtttacaagctttagcatcagaaatcggtgcaaatgcgatttatcaagcaacggatgtgactaatcgggatcaaatggcgagcttagtccaattggcgcttgatcatttcggtcgcgtagatgttttatacaacaatgccggcgtcatgccacaaggaaacctgagcgaacgcgattatgatcaatggcaaaagatgctcgatatcaacatcatgggcgttttaaacgggatcggtgcggtcttaccaacgatgcaagcccaacaagatggtttgattatttcaactgattcggttgccggacatgtggtttatccagcttctgccgtttataacgggactaaatatgcagtgcgcgctattatggaaggcttacgccaagaagaaaaagataacggcattcgttcaacaattgtttcaccaggggctgttaaaacagaattggtgaatacgattggcaaccctgctgttttcgaaggggttaagcaattaatggatgcaccagaagaatcagcgttggccctcaatccagaagacattgccaacgcagtcttatatgcgattgaccaaccaaaacatgtagtggttagtgaagtcttaattcgcccagctaaacaacaagtttaagaaaagtgggcgactaagcgggtagtgcgtgcggattagcctaagcaggcgaataactgatgcagtcagtggtttgactgatgtagctaaacgtaaggcattgcttcgacgagcgcgtttcaaaatggtatttagtaactgagcataaaaaaatcaccttaatctgtttttaagattaatgaagtgaaccccaaatattggacgaaactttaagtagctttctgggttgtaaaaattcgatattcaatcggacttttacaacccagttttgttttaattcttgaaaaattataatcatcaatccaaaccgatatttgtgaaactagcgtttcataagtatcggtttctttttggtagaaagcttcggctttcataatatggaaaaagctctccattgctgcattatctaaacatgttgctttgcgagacatactttgaaaaatgcgatgttctttcaagatatgagtccaatcttgatgctggtattgaaatccttgatctgagtggactgttgtccggtattttaaattcttagggattttcttaactgctcgattcaaaacagttgtagtaaattcaacagtagggtgtttactaacttgatggctgagaatttcacctgagaataaatcataaatacatgtgaaataggcgcgttcatcaattgccttggttccctagcgaacttcagtaacgtctgttactagtttttgataaggacgatcagtgaagaaacgacggttgattaagttcttagcaacggtgccaacattgcctctatatgaattatatttacgagtacgtttgttaaatgcagttgatagtaattgcagttctcgcattaagacaagtacttttttatgatttactaagatattcatacgatgtaattcaccagttacacgacgataaccgtacgctggatgatttttcttgattatttggatggtttgtttaacagattggtcagatgaaccgttcggttcatgactaataatgtattcatacgtacttttggccataccaactatttttagaatttttactagtttgtgtttaagccttagctcttggatgacttgcgcttgttgttttcttcttcctggactaaggctcttaatttttttaggtattcattctcgatttgtagtaattcattttcttctctaagacgttctaactctgtttgttgccgtttttttgattgtttatcagctgacataattgtttgccgtcctttggaacgatataaggcatcagcaccctcagtctcccaaatatgttgccattgccagatggtcccgacgtttgagatattaaaatgaagtgcggttttcggataagaagccttattcgttttcatccattttaaaacattcatcttaaatgagccatcaaatgtttttttgggtgataggacatccagtctttttgggccaaaggccttataacgttgaacccacgagacaactagtgagttattcttaataccatattttctcgctattaatttataacctaagggtgacgttagataatcctgaacaacttttatttttaatgttttagaatatttggtccaatatcgggggttcacttcataaggtgatttttttaattaagtgcaaccaagctgataatcaaaatatgaaatggatgacaacagcttttttaggctaaaagtcgtataatgacagtattctaaatgaaattggagatcataatatggcagaattgatgcgtttttatcaaagctttcaaccggaacattatcaagtttttctagatattaatcgggctcaaaaacaatttagtggtcggacgacaattacggggactgctaaagaagcacttgttttaattcatcagaacggtttagtgattgaaacagtgacggctgcaggtaagagtgtgccgtttacagttgataatgacgcaaatgccttgaaagtcgaagtcggccaacctggcgaagtgactttggtaattgcctatactgccgctttaacggattcaatgatgggcatctatccttcttattatcaagtcgatggggtgcaaaaagaattaatcggcacgcaatttgaaaccaattttgcgcggcaagctttcccatgtattgatgaaccagaagccaaagcgacttttgatttagcgattaaattcgatgagcacgaaggcgaaacgattctgagcaacatgcctgaaaaagaagtcatcgatggcgttcaccactttgaaacaacggtccggatgtcaacgtaccttgtggcctttgcttttggtgaattgcaaggggttcaaaccaaaacggagagcggcgtgcaagttggcgtctttgctactaaggcacatcaagcaaacgagctcgattttgcattggacattgctaaacggtcaatcgaattctttgaagacttctaccaaacaccctatccattaccccattcatggcagttggcattgccagacttttcggccggcgcgatggaaaactggggcttagtcacttatcgggaagcttatttattactcgatcctgataatactgccttggatacgaaacaccgcgttgcgactgtgattgcgcatgaattagcacaccaatggtttggtgatttagtaacgatgcaatggtgggacgatctttggttgaacgaaagttttgccaatatgatggaatacgtcgcaatcgatgcgttgcagccggactggcatatttgggaaagtttccaaacctcggaagcagcggcagccttacaacgtgacgcgactgatggggtccaatcggtgcatgtgcaagtcaataatccagccgaaatcgatgcgttatttgatggcgcaatcgtgtatgccaaaggcgcccggatgctcgtgatggttcgcgctttaatcggtgacgatgctctacgcgctggtttgaaagcttattttgcagcacatcaattcggaaatgcgactggcgctgacttgtgggcagcactggggaaagccgctaacttagatgttggggccattatgcattcatggctcgaacaaccaggttatccagtggtaacggccaaagtcgttgacggacaattaacgcttaaccaacaacaattctttatcggtgagggtcaagaagttgggcgtcaatggcagattccattgaagagcaactatgcggcagccccattattgatgactgaccgtgaattggtactcggtgattatgctcaattacgcgccgacaatgggcaaccattccgcttaaacgtggggaacgaatcgcatttcattgttcattacgatcaaacattattagatgatattttaaatagtagtgctgacatggcaccaattggacaactgcaactactgcaagacttacgcttattagctgaaggacgtcaaatttcgtacgcagatgttgtgcctgttttagcaccttttgccaagagtgattcaaatgtcgtggcagatgccctttacacggttgctggtaacttgaagaaatttgtgacacctggtgaagaaagtgaacaacacctacgtcgattcttcgaccaattgagtaaagcgcaagttgcacgcttaggttggctggttcaaccgactgatagcaatgacgatcagttaatgcgcccaactgttttaagcgcagccttgtatgctaaaaaccaagcagccattgatgtagcccatactttattccaagcgaaccaagaaaaactggtcaccttaccagccgcaattcgggtactggtcttgatgaatgaggtccaaaacttcgggaatgccgcactttatgatcagctcttagcagcttatcgccaaacgagtgatgcgagctataagaatgatttgactgcggccttaacgcgcacgactgatcctgaattaattgcgaccttaattggaaaatttgaagatgccagcaccatcaaaccacaagatttgcgggcttggttccgcggattactcgccaacgacaagagccaacaagcaacctgggattggattcgcaacgattggcaatggctagaagagacagtcggcggtgatatggaatttacaacgtatatcacctcgattgccgcaatctttaagaccccagaacggttggcagagttcaaagccttctttgaacctaaactcaacaccccaggcttaacccgggaaattacgatggacattaaagtcatcgaaagtcgggttgcattgattgaagatcaaaaagcagcggttaatgaaacaattgccaaacatatgtagtcgaacgttgtgcaagttaaattcaatttgaggggttttgagatgacgattaaattagtcgcgattgatattgatgatacattattgagttcacagcaccaactgctagccagtacgaaacaacaagttgctaaggccctggaacagggtgtgaaagtcgttttgtgttccggacgcccattagctggcgtggtgccctttttaaatcaactagggattgccggtgataatcaatacgtgattacgtttaatggcagtattatcgaaacggcgtctggtaaaatcttgaaagaagctggcatcagccgagaaacctaccaagcgattgatgactactcgcaagcaacgggcttaccgtataatgtgctcgatcaaaatagtgtgatttatacgagtaatgtgaatgttgcaccaatgacggtggtgcaagcttgggaaaacgaagctggtattcatattcgcaaaccgaatgaaatcgacgcggccacgcagatggtcaaagcggtctttacagggaccagcgaacagttagatgtacatgaaccacaggtacacgcgcaatttggaactgataattatgttgttcgtgcggctgacctctttttagaagtgatgcacgctgatgttaataaaggcaaagcagtgcaatacctcgcgaataaacttggattcgcgccggatgaaatcatggcgattggcgatgagaaaaatgacatcccaatgttccaatttgccggtactgcggtggcaatgggcaacggttcagctgaagcaaaggcgcacgttgactttattactgctgataacgattcggacgggatcgcccaagcatttgatcaatttatttttaaagtataatcaaaaagcccctgacttttgtcaggggctttttcttcgatatgtacaagctttccaacacgaatatgattttgttcaacaaaggattaatgctggctatatcaatcaatcgattgcaggcgttttgtataccgaaattaatcaagcacagttattgcaactccaacaattccaaggaacggaaactcgagttgcaaaagctaaagcccttctattggggttcgttattaattgatggctttattttagtgattttaatgggtcgcttttatcaattaccattcctgaaaactgatccgtttttagtaatggtgattttgctaatcgaagtagctaatctctacatgatgttgacggttcgtaaccgtcaacaacagttaggaattcaaggtatatcacagaagtcgattatgatgtatgtattcggtggattaattgttctgttaattgttggattggcactactctcaagtcaatggggcgcaattggcgttattagtgggggcgttgttggtgggattgtcatgcgggttcgacaacgccgctcgaagaatagctaaataagtgcctcaaatacattagttgtgcctgcgttttggagtctgttagtgacattaataggggtaattagcttggtcaaacgaaataaaaaagcttaattaaagaaaaaagcgcggtagatttgtaaaaatctaccgcgcttttttggattaagcaaacattttcttagttgcgcgcatcaatgtcttgatgtcacgatcataacgtggtgtatcgactaacttggccattggaatgccagcgaagtgataagctgcaatttcgccagaacgaacagcactttgttcagtgaaaatcatctgataaggttgttcaacgaattcaccagtgaaggctaagttggttgaatgttcggggatgacttctggacggtcagttttggcacgattattaaagagtgctgaagcatatggcatatagacaggaatgttattgatgacactgtccataatttcagcttctttttcacgaatattgattgggccaggatcaacttttgatagttggccaattaattcttgaagcatttccttacccgtcatttcgatgtaaggtttatccacaaattcaccgttacgacgtgggtagaggaagtaaccccagataaccgcttcgtttggtttttgcgttgtgaagtgtggttgatggtgaacaacaatcgacatattcacatctttttgaccaagtggtgtgattggtttcgttgataggaacgaattcaaagcattcccaggaatttgcgttgtaatccgttcgatttcgtttaacaaaatatgattcttagtcgttaaagtgaagctgacccactcactggcattgcggtcagcgaagaatttatcgggattgccaagattatagaatttagaagcgacttgtttccacagaccggcagcagcaccataatccatgttttcagctgctggtgtattataatcgccaagtgttgcggaatcggtaattgacccgtttgtgaagatgaccgctgtgtcgtcgtccaccgtaacgtgttcaacttcatctgtctcagtattagtcattgtcataccagtaaccgtaatttcatcggtcatctgagtctctttaaagtctaagtcagtaatccgtcgattgaggataatgtgacaaccttgcgcttttaagtagttaatcagcggcagcatgatactttcgtactgattgtaacgtgtccggttaacaccgactaagtgttcaatctgagtgaattcataaatcatttggtgcatgtaacggcgtaattcttgtgcggaactttgggttctgaaagcaaaggtggtttcccacatgtaccagaagtttgtttggaacatatgtggatcgtccttgaagtattcggcaattgaaacgttgtctaatttttcttcttcagaatcgggcatcataatcaatttggtcattaataaccgatccttattattaaagccgagatgaccagcatccaaaatacctttactaccttctaataaacgtgctttgtcgaatgtgcggtgttgagcatcgaatgaacgggtatcttcttcagccgtcatattgggttcagttgctgaaggaatccgacctagaagatccattaaatcgacataagtccgatagttaagcatccgcccaccacgtgcaacgtagcccttagtattttcgagaggatggtttttattccaatattcatcggttgtttcggaaactgatgccccatcgtttgaaccatggtcatctaatgaatagaatgtaatcgcatcgccagaccaaccgccttcttgaattaaatagactgctgcggccatgttagaaaggccagcgccaatcataattgcttttttcttaatcatatgaaaaacctcctagattcagtttagaaatgacgagtgactaacggctttcgaatttttcgtaatccacagaatcgtctctaaaaagttccattttcttagctaataaacaagcaccggttgctgtaacacctacaaaaataaggctgcctaatagaaattttttcatgtttctcgctcccttccattaactacttttgatatctatattataccgcgaattcctaaaataggaagataaaacccttacataggaattgtcagtggtcatgatacgattattgatgggattaggccgctaaaaatcagaatagttaagtttagtttaaggctcttattagtcaggcataattcctagggaagcactaacggatttaaaaaaagtgataggcccccaaatgatggttgacctcaagtcagcttgaggttgtaaagtagtcttattgattagaaaaaggagacttttaaatgcaaaaattatctgccttaacagccccaatgaccttaagcaacggtgttaccattccaggattagggtatgggacatatcaaacaccaaatgaagaaacaaaaaaagcggtcttagaagctttatcagttggctatcggcacattgatacagctaccgtttacggcaacgaacaaggtgttggtgccgctttgaaagaaagtgatatcgcgcgtgaagacatctttgtgacaagtaagctatggaatacagaacggggctaggatgctacgaaagctgcctttacacaaacaattgcaacgttaggtgttgactatttagatttatatttaattcattggccagctaacactaaacaatttgaagccaaagatgctgaattaaatgctgaaacttggcgtgcaatggaagatctatataacgaagggaagatccgtgcaattggtgtgtcgaactttatgccccatcatttagatgcactcatgaaaaccgccgttatcaaaccaatggttgatcaaatcgaagtccatccgggctggccacaagcagaagctgtgcgttataatcaagcgcatgacatcttagtcgaagcttgggcaccacttggtgaagccagtgcgctttcgaatgaaacgattgcaacaattgcgacgaagcacggcaaaacggcagcgcaagtttgccttcgttgggggattcaacaaggtgtgttaccattacctaaatcaactcatcaagaacgaatggcgcaaaataccgatatcttcgattttgaattaacagatagtgaaatgacccaaattagtgctttggaaaacttaggcggtcaatgcatggtgccagatgacgttgatttttaagcaagtataaggaaggttaatatggcattatcaattggcgtagtcgcccaacaatatgatttgagtattccgacactacggtattatgaagaacaaggattattaccgtttattaaacgcagtccggctggtcggcgtgaattccggcaagctgatttagactgtttatgtgatattgaatgtttgaaaaaaaagggtatgcagttaaaagatattaagcaatacatcgattggcgaactgcaggtgatgaaactttggaccaacgcttggcgttgattcaacaacggcggcaaatgttggctaacgagattgaatcactgcaagcagaattgacgaagctagatcataaagaatggtattacacaaaggcacttgaagccggaacagaatccatttttacagctgactgtgatacagaatatgaacgtgcgcatcaataatcgaaaaaagaggcaacctgataggttgcctctttttgtgtgtttaaacggttaatgttttttgcataatcagatcacgttgtgcgtcgcttccaagttggaagatgtgatcaccaacttggctgaagccgaggtttttgtaaaagttaagtgcagcagtgttgtgttcccacacgccgagccatacgttagttttatggaattgttgcgccacggctagtgcatggttaattagttgtgttcccaaaccaagtcgcttaaaggactgtcgaatatagatacgttcaatctccagtgaatgcggggcagctttttcagtttgtgcgccatcaatgttgagctttaaataaccagcgacttcgccatcttgataaataaaatagaagaacgaatcgggattctcgagctcgctagttaatcggtctgtattataagcttcttctaagtagttagcgagatcttctgctgcattttcagcgccaaaagttgctgtgaaagtttcacggctgatggattgtaagtcaggtagttggtttaatgtgacagcttgaattggcattgtgatgcctcctttgttgtaatagtgtcggacgtgtccctttttgacaaaatcccagtttgcggcaacgttggcactaactttgtttaggagtgcttcaagattatgggcctcgtcggtcgtcagtccagtcagtgccatttgatttgaataatcgttttcagctttgatggcgggatagacggctcgaccggcctcggtgagatagagatgtttgatcttacgattggttttgtcagggtatcgttcaactaaaccatgcttaattaattgttgaacggcgcgcgtgactgttgcgcggtcgacttttaataattcacctagacgttcttgaatgatcccaggctgttctgcaatgcggactaagtaaaggtattgcccgcgggttaaatcatattgttggaattcaatattagcaatggattccaacgcgcgggctataaccccgattgggcggagaatttcagtcatgatggcatacctcatttcgataaaaatagtataaaatatttttgttgcatttacaacaaaaaataaagcttcgattcgttaagtacgccaaaaataagaatataattaattctcgaaggaaataataagaaagggttctctgaaatcggcttctaaagtcgtaaaaggcgcttacaaagcctatattttatgatttgttaagtaagcataatgtttatgtaatgttaatgtaacattcgccctatatacttagtctcagagttcgggcttaactaataggagaaaataaaccatgtcatttaaaaaaacgattacgactacaattgctcttggattattaacagcttcagttctttcaacaaacgtagtatctgctgcaacttcaagtgaagcacaagaagcgattactgctaataagaacgcaacaaacgatttgctcaaacaaatcgaatcagctaatacagaagtgattgggttggatcaaaagatttcaacaaacgcttcaaaaattgctgatcaagaagcagcaattactaaagcaaataatcaaatcgaatctctttcaggtcaaattacggatgctcaaaaagaagtttctaaacgaacagtcgtattgaagaaacaattagtgaccttacaagaaaagagtggggatgctgtcagcgggaacgtatatgttgacttccttttaaactcaaatgacctttcagatttagtttcgcgttcattcacaattaataaattaaaccaagcaagtaaagaagctttagatgatgttaacagcgctaaggtaaaattaagcggcttgaagacagaacaagaaaatactaaagcaagtttagttgctactaagactgatttagaaaaacaaaaagcaaacttagaatcattgaagagtgaagctgatcaaaaacaaacagctttatcacaaaaaatcaatgataacaaagacgaattaacagctttacaagcagatttcgacaaagcaagtactgaagaagcagacgctgctgctaaaaaggctgcagacgatgccaacaatgccaacaatgctaaaaaagacacacctcaacctacatcaattgacacgccatcagataataagggtggcacatctgttttcggtggcagcggaaaagttgctggtaattcagctgggaattcatatgcatggggtcaatgtacatggtatgttaagtcagtagcaccttgggctggcaataactgggggaatggcgctcaatggggtgcttcagccgcagcagctggcttcacagttaaccatataccagcagcaggcgcaatcgttagctttgctggtggccaaatggtaggttcttgggccgcagatgggacatatggtcacgttgcttacgttcaatcatacgatgccgcagctgggacaattatcatcactcaaggtgggatgggcttcagcaaccctgctggtcctaacacccaaacaatttcaaatgccggggcatttacttatatccataactagacattaatgattgaaggcccgcatcctagatgcgggcctttttttatgaaataaaatcaattttataaatgttaagtaataattgccgttatccgctactaattctagtaggtagtattggtaacaataattgacatctaagaattcgttatgaatctccacctattttcctccactgactactttgttcgttcttggtacgcaatctgaaccactaattgatagggatcattgccttcaaccacgccactacgcccggccatcttgttcgggccacccgtaatccaagtatgggcgactgcaagttgataatcttgggctaggtcttggattggggttaagccaaccgtcgtaatctgcgctaacggttgtttggcaatggcgttaatccccccatagagcacccaacgatctgcttcttgtttcatttcataaaacggtaaagcaacttgattcccaatcgcataaattggtcgctgcaattgttgcgcttgttcatatatatcattatcacttaagcctgcgtaattcaagctaagatagccagattcaatcagttcgttaatcaaggatcctaaacgttgggtttgttccgcgtccattgtcagttgcgcgggcaagagattttgttcttcaaataagccagtggccggttgaatttgtgagatcacttgcgttttggtggttaccccatttagtggatgtggcgcgtttggatcaccacccagcgctttttcaatatacggtgaaatatcgatgaccgcatttttgccccgataatagaaatacaggttcatcactgcaaaatagaataacaccaaaaagacgaggaggttaatcacacctcgtccaaccgcttgagctttaaagtaggtcacactcttatatagaagataaaaatcaccaattaaacaaataactgaaaaaaggcgatttttaacgcgaccattaatatttaagtaaccgaaataatggttaataatgtctaaaaaagttaacacgataaatgtcccccttattgcgcgtaaaacaaattattactgcgtagcagtggcactgctactacttgaaaccactttagcgctactacttgtgttagcagagctactgcttgccgtggtcgtgttagctgactcatcattttgtggtgttgttgtctgctcatcatcagatgattgtgagttggcatccgtatccgtccgatcctgacttgaaacagccttagaagaggaattaacggttgattcagaggtcgatgaggattccgattcagactcagattctggttttgatgtattcatgctgctggttgaacctgtggttgcactactacttgaaacaaatgacgactgctctgtcttggtgttttcaacaggtttaaccgtatttgccacaatgttggtcgcactcattgcgataattaacgaaataatggcggctggtggaataatgggtggtgtgtgatatgccattttaacgctccctttctattatgcttggcagtcttcacagaggccatagagttcgaactgatgaccttcaatttgacaatttggaatttgctgactaaaaaaatctaacggacacattttcaattcaatcactttgccacactggcggcaaataaagtgatgatggtggcgatgttcaaaatcgcattgatatttaacgtgggcctgttcaccctctgtttgttgttctactaagccaagttgttcaaaatctttaatgttgcgataaatcgtattgtgactcattcccggaaaaatggcgcgcatatgctcgtcgatttgagtcacgggaatgtagcgattttcatatcccgataaatactgtagcatctctcggcgttgcttggtaattttgtacccatttgcgcgtaatacggcaatggcagtggttatttcgctcatttaatacatccgctcctctcgattaatcgatacgccattctagcacatgctttctaggttgtcaggcgctggcgcttgttactaccaacttcaatttagttgttaccccacactatttaccattatacccttaatcccataaccgttagctaagcacaactaaatttcaccaaattttaatgaatccgaatacaaaatagttgcattatctcaggctgcgcgttatgatgtaattcagatgatttttaagaaatcgtcttcattagccttctatcagtatttatagtcatttgaagggagattttacgatggaatttactagtcaaactaataattggtatcatgtttcacttgatacgcaaactcaaaaatttatcgcaactgcaacgaacaatgaaaaaatcagcgcaagtggtattacaattgaacaagccgtacaaaaactcagttataaagtgaaacaaaccaattcggttaaccaacactcatttgcataagggttaaccatacgttaaaaggaagcctgtcgaacgcgttcgacaggcttcctttttattttcaatgatcaattttttagggttgcgattaatgttgctaaggcttgcttagttgtttcccagtcatcgttaaccaacacagttgcccgttgatttaaatgactcggtaacatcagatcccgcttaaattcagcactttgaatccgtttttgaattgcttcaggactatccttccgtttttcaaggcgcgtaatcaacgcatctgtttcagaaaccgttaagaacaagaccgatgcttcttcggggaacgtctctaaataagtctgtgcccctttggtatcaacaactaggctaatcagctgtgctttttgccacgccaaatctaacgcttcatgtgaagagccatattgatagccagaatagctcaccgattcaacgaggtgcttttgtgccaaggtgtctggtgtttcaaaataataatccaccccgtcgacttcattatgccgtctaggccgcgtggtatgggtaaccacttgtggaatttgaaaggcctcttttaaataatggctcaccgttgttttgccactacccgtggcgcccgtaatgactaatagttgttttgtcactattcattcacactcttctattcaggatttaaataaataaaaaagtttggcggcttaatttaagcagacgccaaacttttttattcttttatttaatcttataaacgacgaccaaagtcaggtttgtaatattgcattgacatcgttgttacattttggccttctgttggtgcgtgaacgtatgagccaccaccgatatagatcccaacgtgatgtgctgaaccaacgccaccccagaaaacaaggtcaccaggttgtaattctgataatgacacttttgtcccaaccgtgctttgttcttgtgatgtccgtggtaagctaatgccggccatcttagcagcgtaccaaactaaaccagaacaatcaaaaccaccaggttgtgcgccaccccatgcatacggtgtgccaatgaattgtaaggcattgccaactaatgaaccagtgtttgcaccagatggcgcaactgtcgttgtttttgcaggcgttggtgctggtgtattgtctgaacctgttttaggtgcaaccgttggtgcgattgttgctttttcagtttcttttttagcagcttcaacagcggctgctgtttgagcatctaattgactttgtaagctagcaagctgtgtcttatgtccatccacttcttgttggaaacttgcttgttcattttctgcatctgctttaagtgatgttaactgtgcttgatctttttctaactgtgcttttgtgttaactaagtttgcttttttagtcacttgttcttgttttaaagtagctaatttactttctgagttcgctacggcgtccattgcttccttgttagcttggtttaacttgccaacaactgaagcacgactgaccatatctgagaaactatcactattgacgatgaagtcaacgtaaacatttccagaaacactatccccagcacgtttttgaagcgcaattacttgttcttttaaaacagcttttctagattggacttcagcttgaactttaacgattttttgagccacttcagtaatttctttgtccgttgatgcaatgttcttttgtgcatcatcaattgcaacggtcttatttgacacttggctatcgattgaagcaaccttatcttgtgcagcacttaacttagctaataaagccgagttttcagcactaaggtttgtcattgatgcttttgtatcagcaacttcatcggcactgactgcaccaatgctaaccgccattgttgacccaattgttaagaatgctagtgcactgaacattaatcgactgacttttttcactgaatgattcccctttatcatttttaaaaatacttaacttatgtacggttttccaaccaagaacaagtgtaacattcaactattacagaaatgttacagcttagttaccgtattaagtctaaatcgggaattcacgctacttgttagcggttaacgcggcttggattttaacccattgctcatgacttagcaaaaccgcggtttcagtcccacttgcatcgacaatttcataaatgagcggtttgacattgacctctttgataatttggttcagcatctttttagcgtatagtgcctgaatttttttacgtaacattttctatactcctcgagcgtgattaattgtgttctcagcacaatcagcttagaataaaagcatcttttattatgaaatgaggtttatgcaaatgcaaatcacaagacatgatcaaccactcgatacaatcggcacaccaccagccgtcggcacacagttaccccaatttgaccttaaaaatgccgctggcgaaacggtgacttctgcgcaattgctcggtaaacggactttaattagcgtcgtgccagacattgacacccgtgtttgcagcattcaaacaaagcattttaaccaagccgtcgatcaattcgaagacgtccatttctacacaatttcaacaaacaccatcgaacaacaaaataactggtgcgctgcagaaggcgttaagaacatgcaactcctttctgatgaggcactcagtttcgggaaagcaatgcaactctacgttccaagcaacaacacgcttcaacgctcaatctttattttggaagcagatggtacaattagctacaccgaattaattatcgaacaaacagacgaaccagattatgcagctgcattaaatttcttaaaagcagcccaataacaaccccaaaacgatggttagaactgactcagtttaaccatcgtttttttttcggttattatgtaaaattattcacaacacccttgataaaacctgagcaatattgctccaccttatgaaatgacgtattatacccgtattagcatctcaaattaaactttattaaggagtccccatgaccgagctatctaacgagcttttccaaactttcaataaggtgattcaccattatcgccattattatggcatgcaattttcatccgatcatcgctcagtcagccaaattcgcattctaaaacgccttaatatcgaaaacggacaaatgcagggagccctcgccgaaagtctcgatattcggccttcatccctaaccgaatgcttgcacaaattagagtctaaacactacattaatcggcggcccgatcatcatgatcggcgaatcacccacgtcttcattacagcggcgggtcgagcggttttaaaagaagccctcgatggtcgcaatgaatttacggagactttattcggtagcctaacccccgacgaacaacaagcgctcaacgaacttctaaataaattagaagatacgttagccgacacacaacattttgactttatggctgaattcactaaacgcctcgcccaaaccaaactataatcactggaggaatcgtaatgcgcaagatacttgaatatggtttagccggtgtggtcgcctacctcataagtcgctacttcgtgtggcacattgtcttaccaacactcaacagttatccacgcttaacccgggttatggcccgttttccagcaacgacgctttttctgattctatttttaacccttacattttggttgggctgggtgcaatgggaccgccgacaactatcgccaatctatggttatctcgtctacagcgtctatctgctcttattattcattatcttattcaccaaagcaaacgtctatcatgcagttagcttgaacccgttcgatttcattcaaaaggatcacaaaacactgctcgaagccgcactgaatgtcgtttacttcatcccattaggcggtttgtaccatttgaaagcctcatttgttgaaacgaacatcatagcgctcttaacgattctaggcattgagattctccaattcgccttttatctagggactttcgcactcagtgacatcctcttaaactggtttggctgtttaattgggtttggcctttggacacttgcacaacatcattttacagtccaaacaaaaagcagctaggcattaagccaagctgcttttttaacgattgagcgtaattaactgcttataaagttgattcgttagaagtccaattgaaggattggccttatattgattcgataataagacaattcctgaacgcccattctgactcatctgtaagctagattcgaatccagattcgaccccatggcttgtaaaataatctttgtaattataaacaccacccgtatattcaccagtagtcgatgagcggagcgtttttaataacgattttttaaaaacttttccttgaacaatcgcctgttcagttcgaaagaggctactcgttgtggcatacatatttccggtccctaactcacgcatatatacgtaacttggttcactaactggcgtgccatagccgtcttgttgatagccataagcagtcgcttgttggccggtcgtttcatttggcataaaattaaacgatgttaatttaaacggtattatcaactgatttccaactaactctcgataactcttatgggtgacttgttctaaaatcccggccaaaagaaggtaattaactggcgaataattatgctgaccaatatctttaacagccaaatgatcaagcgcatattgaatccgcgcttgatctgataattctttttccggcgcagataattcagtcagtccagaacgcatatcaaccatcatcttcagcgtaatttgatccgcctctttaatctgcgggtaataccgacttaacggtgtcgctaaatcgatgttcccggcttgcacctgtttcatcaataacgcagccgttaatgacttttgaatcgatgcaatctgatacgtcgtctgtggagaattcagttgcttagtcgcaaaatttgcatagccccggccaccttgaaataacacatgattccgccgcacaattaaaatggtcccgctaaaactgttatcatatagcaactgctgtacaaattgttgttccttcgcactcaaatgattgatggttcgatcatcaatcccggcttcatgactttttgccttttgaatggctaactcaagttttgttgcctgtaattgttgctgaagttgtttcattttttgttgggtttgttgagtttggacggcatatttttgccgttcatgataaatcgtgccgccaataattagtaggatgagccctaccaacagcagtcctcttttcaatttgttgtccatccgcttagtccgctaatcgtcccttctcaatgactaccatttgagcatcgaatcgataatacagtgcttcaccattttcaacttccacaccatcaatatcgcgatctgaaatctgttcgatcaccttaatgagcgcacgcaaagtagaaccatgcgctacaatcaattgatcctggcctgcaagtaatcctggcactacttgatcttgccaataaggtaatagccgttgcgttgcctgtgcaagactctccccgcgtggccgactcatcggtggaactagtcgataacgacgggcctgcgaaaaagtcgtcaataaaggtgggaccgccgtgtaactacgccgccagcgggcaacttgatgcgcaccaaaaatagcccgcgtcttttccttatttaacccgcgcaatgccccataatggcgctcatttaatcgccaactcttcgtcattggaatggccaattggtctatttcatccagaataatgtaactcgtcaaaattgcacgcttcaataacgaagtatgcacatgactgaattgaattccggttgcttgaatttgtcggcccacatgctgtgcttgtttgcgcccagcagccgttaatggcacatcagaccaaccagtataagtatttaattgattggctaaactctcgccatgtcgtacaattactaaattcgccatgcgttaaactcacttttcctgtcgtttaaaataatccctttcagtataccacgaaccgtttcccgtgataaataacgcggcgtttccctaatttaaaagatcgtttaaatagttaaggaactgtacagttttgttgtcatctaccaattaattgtagtacaatgaatctattgaattctaaggatgtgcgatatgtcagctaaagcaaaagaattttggaaatccactatacaaatcattttattagcggccgtgatggtcggcattgcgcaattactgcttaaattcgtcattgccaatgaacaaattttcgggccatcaatgcaacccaactttacacagtatgatcgggtcattgcactacgccatacgaaactgaaacgcggcgacgtcgttatcgtcaaggcccctgattcaccaggtgaattctacattaaacgaattgtcggcatgcccggtgaaactgttcgcttcaacaaggatcaactctatattaataataaaaaagtcagtgagccttatttaaatgattataaaaaagatccaacaaccttcctagccgggtcaaactacttcacactcaacccaaagactaataagccaaactttgatttaaaggacgtgcttggtcgttccacagtccctgcccaccactacttcgtcatgggtgataaccggactgtttcaaaggatagccggtatgaagaagtaggctttgtcagtgatgattctaaaaccttcaacgggattcaaggcgttgtcaaactccgctactggccagtaacgaaatttaaagtttactaatcacgaaaaaaggtccaccacgattgtggcggaccttttttgaccgtttttttaaagatagacactaacaccgagtaaaataattgctaatagaccaataatcgccattaatggccaaacgaattttaaccacttatcaaacgttacatggaccattgccagcgaggccaagaccaaaccagttggtgtgataaacgacataatgccttgtccccagttataagcactaataataacgtcacgattaacaccgactacatcagccaacggtgccatgacgggcattgatagcaccgctagaccggaactcgacggaatgaagaatcctagtagaatgaaaacgaagaacatcaccgttgagaagataacaccactcatatgggaaacgccactacttaaccagtacaatagcgtatcactaatttgtgcctgttccataataatcgtcacgccgcgtgctaaagcaatcacaagggctacacctaacaggtcggaagcccctgcaacgaattcactaacaaaatctttttccgataatccggaaataaacgccaaaataaacgtaatcgctaagaataacgaggaaatttcattaaatagccaaccccattccttcacgccgaagaccatgatgacaaaaccggccgcaaaaataattaacatcaatttcttccggaaatcaaaccgtggtacttcattgacatcactatttcccaggaaatgtttttccaattctgctttttgattataaatgagcgattggcttggatcctgttttactttttcagcataccgaatcgtgtagaaaatacagattaatgtgcctagaatcagcattacaagccttagtcccataccatctgtaaagctaatgccagccgtattagaagcaatcacgacggaaaatgggttcaccgttgaagccattgtcccgattgaactgcctagataaatcgccgcaattgcgactagcgcatcgtagccagctgccataaagattggcactagaattggatagaaagcaattgtttcttcagccaagccaaaggtggtcccgcctagggcaatcaagctcgttacaatcacgattaaccaggcttctttacttttcaaacgttttgatagcgccgccattccggccgcaaatgcaccggtcttattcacaacgcccacaatcccacctagaattaagacaaatgtgataatatcgattgtttcagataacccttgaatgggcgcattcagaaattgtttaatcgcgccaaataagtttggtttatgctgattgagtttttgatatgtatttggaatcgcaactggtttatacaccgacccatccttaaacttcgctaaatccgtattaacgtggtatttcttcagtgttgcttgtgtcccaggtgctgtcgattcatgcccattgggtgcgaccacagtgaagttttcctgggtcgtgttatattgtaaactcgcatattttccggctggcataaagtacgtcaagatcatcactgccagtaaaacaagtagaattactgtgtaggcgctcggaaaagtaaagcgttttttcttatcagtcattcaataacctccataacgccctccatcgctgaagagccattttataaactcaattatatcacaaaggacgcttgcgctttttccataacacccttgcacagactactttcctgtgctaagattggcaccaagcaaaataagggacgacagagagcgtcctttttggaggaaaactgaatatgaaaactattacggcacacagccaacatcgattaacaagctaccagactaaggtggtcgcctcaacgacggccggcttcggtctcgaaaacatggacgttatgttcttgtctttcaccctatcgtccatcattgcagatttgcatctcagtgggacacaggcgggattaatcgcaacgattaccaatatcggaatgttgttaggtggcgttttttttggcgttttagccgaccgcgttggacggattaaaatattcacttacaccatttttatctttgcttttgcgacagcggctatgtcatttgcccacacccttcccatgatttatctctgtcgcttcttagctgggatcggtgctggtggcgaatatgggattggcatgacggtcttagccgaatctttccctaagaaacagctcggacgtgtttcatccttcgtgggtgtcgcaggtcaacttggcgctattgccgcggcacttctagcagcgtgggtcttaccacaatttggttggcatgcactatttctattcggcctattacctgttatcattactttttttatccgccatcatctagtcgaaagtacaacgttcacttctgaatcagatcaaccaaaaggtcagattagcgctctttttaaaacacgcgaactagcttaccaaacagttgcgctgatgataatggcaatcgtccaaatcgctggttacttcggtttaatgaactggttaccaaccatcatgcaacaacaaatgcacctcagtgtggctggttcatcaacttggatgttagcgacgattgccgggatgtcagcaggcatgttgactttcgattggattctagaccgaattggtccacggtttgcttttgtcttattcctgattgcttcagcagcaggcgtttacatcttaaccttccccaatagcatgggtgctttattgttcgtcggtacaattgtcggctacttctcaaatggtatgtttgcaggctatggcgcgattgtcagtcgcctctacccatccgaagtccgtgcaaccgccaataacgtgattatgaacgttggccgctgtatcggtggattttcgagcgtgattatcggttggttacttgatcattattcggtgatgaccgtgatgctcttcatttcaacactctatatcatcagcttgattatcatgctcaccatcaataatttaaaagctgatcgctactttaatcatcaataacacacaaaagggtcgagacaattgtctcgaccctttttaaatttataaactaccgccgcgtacctcggctacgttagccacaatcgtaaatgccaaaggatcaacttcatgaattcgattaataatgtgttgataggcttgattttcaacaacgagcatcaacatctgcttattgtcattagaatagcccccagtaacatcaaaaatcgtcacgcccacatcagattcttcgattaaatgggctttaatttcaggtaattggtcgttactcatgacatagaggacctttttccggttcaacccggtctcaatatagttcatcgtaatcaacgtcagaattgatgaacaagttgctagcatgaacgtctcaaaaccagagacgaacacattcgcaaagcagactagtaaatcaactaccagcaaactcaatgccggtttgatattgaaatattttttgaaaattaacggtggcactgttgagccaccactcgaggcatcaattcgatataacaaggcaattccggcagcgtaaacaacactcccaataataattgctaatagtttgtcttccaccaccatcatttggggcgttaaagctaaacaaactggtagcataaaactaccaaagagaattcttaacgtggttttcttatcaagtaagaagtaagcaagtatcagcatgccgatgttaatcacaaacaccactgttgatatcttccaccccatcaattcttctaataagatccccacaccggttgccccaccggctgctacttcatggggggcaaagaagagttgaatcccaatcgcaataatttcgagagcaatcaagatcaaccccatctggataatcgtctgtttcaaattggataagcgcatcgcgtccctcatttctttattgattattactataagtatatatgaatattaatgaagatgcgagtctaaccacttcatgcttcccgtagtgcctgtgcgagtgccactaatttacgagcggtgttggcattccgaattgtcagccactggtataggtcccctttagcaacagtcgaccaccgcgtccgaccgaatgttttcacgggtgcactccagaaaataaacggaccattcacggcaactttttcatacgctggcttaattgcccctacatgtacactcaattccgcccccgttttaggcgcaatcgccacgattaaattatgtttcacatctggcatattgccccaccaagttggtgcgtccgcaacagcttgaatcaactggtcagctgtgaccacggcgatattcacagaaaagccaaaggtctccaccataatctgatcacaagttgccgctaaggttgttaagcctgtttctggggcttcaaataacacgttgccactattgatgtatgtttgcacattggtgaacccagccgcttcatacgcagttttaagcacgctcattttaactggccgtttaccacccacattaattccccgtaataacgcaatgtattgcatctgaatccctcacttttttattcatcataacttaattagcttttgttgaccagttcgctttatcactgccatatttattattttgtggggaataataatgaaaaaagttttgcaaatagcataaatacgccatttagcttataatagtatagttataaattttcaaaaaaggatggcgcacaatgaacaatcgaactcaaccgcaaaacatcgccaaaggcatgttttgggcgactatggcgtccgcactctggggcgtttcaggtactattttggaattcatctcgcaaggacaaaagatccctgcaacttggttcctatccgttagaacgcttggcgctggtttaattttattacttatcggggcaattaagttcaaacaagatatcttctccatttttaaatcaaaacgattaacggcttggctaatcgcttacgcccttttcggtatcatgggtaatcaatatactttcttcatgagtatccaaacggggaatgcagcagcggcgactattttacaatatctaagtcctctgtttatcgttattggaaccctcgctttcttacgtaagtggccaaatcgaattgatattatctcattcggaattgctttaattggcgttttcctttctattacgaaaggcaatatccatactttaacaattccttttaattcattaatctggggaatcttatccggtgtaacagctgctttctacgttgtgctaccaagaccaatcgttaatgaaaaatcaccaattctcgttttaggttggggcatgttcatcagtggtttactcttcaatatccaccgaccattctggcaagcaccgccgcgtttaaatgcttccggtattatcgcaattttagccgttattttgattggaactgtattcgcatatctttgcttgttacacagtttaaactttgcaccatcaaccgtaatcagtatcgttgatgccgtacaacctgtaattacatttattctaagtatcatcttcttccatgcccgctttagttgggtagaaatgagtggtgcaattctagttatcctagcaatctacatcttgcaacgttatcaggaaacagaaaatgacgccttagcatagcaaaaagccatttaaccatcccataagggactgttaaacggctttttaattacgatgcgctatattatattttacttagcttaatcctactcacagctagtagggttctttataggccacgtaaacatcctgagtaacactaagtatctcattagctaatagctgcaggttaatcactactctctcttggaaaaaactgatggtaacaaaaaaggttaaacctttcggccttgaacggttgagaattttcaatcgttttttatttcggcccgttggtcaagtggttaagacaccgccctttcacggcggtatcatgggttcaaatcccgtacgggtcatcaataatgccggcttagctcagttggtagagcatcggtatcgtaaaccgagggtcacaggttcgactcctgcagccggcatcaatagcatgtttctaccaagtgctaatcgggataatcagcattgtactgacgttttgttagtataatgcttttttaatattcaatttgattgaaaagcaaccactaaaatagccagttacgaaaatcgtaactggctattacttattgttcatttgcccattgccataatagaatctgagtgcgtccagtcattttttcattggctaagatcgtctgtgcttcagcacgattaacccacagggtacttaaggcttcatccacttcaagtgtacggtctgtttgtttagcttgatcaagagtacagattgctagactaacggcgccatcagtaaggcctggtgaggaataacttggcgcaaagcaatgttcaacctcaataagagagtaacctgtttccgccattaactcacgggaaatggcttgtttaatcgactcagttggttcaactaaaccggcgggattaccatagacaaaatcattaaggggctgtctaaattgtttagtcagtaagacctgtgagtgattttgattgtagcagaacattgcaaccgctgaggcattagctggtcgttttaaagtctcgatggttaagttagagtcacgactgacaaaatgataaggcattaaatcgccgtgttcattttgatacattgcttcgtagtaagttagccaacgatcaggtcgtaatggaataagagatgttagtgtaaaagggttcatcggaatcagctcgctttctattagttcattgtactactgtttaaaggcaacaaaccagttttctaagaacatgttaggtatcatgagcattttctcatttaagaataagcattagtcattttgaatcataaaataacttattttaatgaaaaaatcagtgcaaacaatgcagttaatgttgaaaaaagaattgatttaagattaaaataagattataatagcccttatagattctaagcgaatgataagagacttcttgtatagatgagtcgattcaatttaataactatcaaattcttagtttccgtaataataaagttttaaagtggggtattacaatggaagagaaacaagaaaaaacattctttgggcaaccgcatgggctatcaacactgttcttcactgaaatgtgggaacggtttagctactacgggatgcgtgcaattctattattctatatgtattttgctttagataagggtggtcttggctttgacaagacgactgcaatgtctgtgatggcaatctatggttcgatggtttacctagccagcgttgttggtggttggttaagtgatcggatctgggggagcttcaaaaccgtcttcatcggtggtgtcttgattatgttaggccatattgccttagcaatgccgatgggtgcgacagctttatttatttcaattgctttgattgttgcagggactgggttattaaaaccaaacgtttctgaaatggttggtagtttgtatagtgaaaatgatcgtcgccgtgatgctggtttcagtatgttcgtcttcgggattaacttgggctcatttgtcgctccaattcttgttggggctgtcggtcaaaaaattgattttcacttaggcttctcattagccgctgtcgggatgttctttggtttaatccaatactaccgcggtcgttctcaattcagtaaagaaaattcaaaacctaatgatccaattgcgccagaagaattatcaagcgttattcgtaaaattgtgattggtgttgtggtcgtcgttgccgtagtattaggtatgcaatttacaggcaacttaaacattgataacattgtcttgatgatttcaatcattgcgattgcattaccaattgtgtacttctcacggatgttgggcagcaagaaagtgactaagaaggaacgttcacgcgttatagcttatattccactctttattgcagctgctatcttctggggaattgaagaatctggctccgttgtcctagctttatttgcagaagatcggacaattctaaacattggtgggcatagcttagctgcatcaaatttccaatcattgaatccactatttattatgcttctaacgccattctttgtatggttatggagtgcttggaagaaacaaccatctgcacctggtaaatttgctgttggtttaatcttcgctggtttatcatacatgtttatggcacttcctggattattacacggcaccgctggccgagttagcccattctggttaatcggttcatggttcatcgttgaaattgctgaaatgttaatttcaccaattgggttgtcaattacaacaaaattagcgccaaaggcattccaatcacaaatgatgagtatgtggttcttagcagatgctgcgggccaagcaattaatgcacagcttgtgcgtttatattcaccacaaacagaaattagatatttcttagggattgggattgtgagtgccatcttcgggatcgtcttaatcttcttcgttaaaccaattcataagttaatggaaggcgttaactaaatattagaaaaaatcttgattatttatgcaataatcaagattttttttgcattttggggttgatttttctgtcagaattttgtaaactaatatagttgaatcgatgagatgaaacgtatggaggagtagcgaagtggctaaacgcggcggactgtaaatccgctccttcgggttcggtggttcgaatccactctcctccacttgattgggctatggccaagcggtaaggcaacaggttttgatcctgtcatgcgctggttcgaatccagctagcccaatactttaaagacatcttgctaagatgtctttttttgtgtcctggattgactttcctccgctcgttcggtatccttggataaataaaaaaaggggtggcagaatgaaaattggatttattggtgtcggtaacatggcacaagcaatgattaaaggcttagtgaaagctaatcaagtcgcaacaacggatattttagtgcatggcggacatccggcgaactatgcggattttgtagctgaacaacggattacagctgttgcggataacaattcagtggttgaacaagccgacatcgtttttttagcggtaaaaccatatattgtgccacaggttttagcagaaacaaatgcagcctttaaagcacatcaaccattgatggtttcaatggcagcaggtttatcacttgataaattagcagaacaatctgctgcagatttaccaattctacgcatcatgccaaatgttaacgtggccaatcgcgcgggaattacagctgttgttgggaatgaacaagtcaatgcagaccaattggctcgtgtgaaagatgtccttgcacaactggggggcgtggttgaaatcggcgaaaaagatttcacaactttcagtgcgcttgccggtagttcaccagcatttgtttacctattcattgattcaatggcgcgggccggcgttaaacacggtttaacaaagaaagccgcaactgaaattgcagcccaagctgttttagggagtgcccaaaacgtgcttatgagtgatgattcaccttgggacttagtggatcaagtttcatcaccaggtggcacaaccgtcgccggcttattagcaatggaagaagccggcttaatgacagcagtggttaaaggcatcgacgcaacaattgcgaaggatttagaaagccaaaaatagagtgcgctcaagcatgtaaaaagcgtaacctgatacaaatactgtattgggttacgcttttttatattattttgtaaaatggaccatctcatgacagaattggtgggtgagtaagctactttctggtgggacaggatttgcgccgttagtttcaagggcagtaataaacgcatcaatcattggcgcaaagccccgcgtttcaagcgtagacgtccagtcagctgcaacttgaatgcgactgtcttctgccgcttgtgttgtgtagcgcgttagattatcgacagtgaataacccgtgtggtgtctggagacttgcaatttcttgattggtaccactttgcatatttaaagtcgcgctgattaattggcgcggtgtttcaatggttaattgtgcgagttgcaaattgccgtttgcatcctgctgacagtatggacggattttgtaattggtacctagtgaatcagccaagaaaagcgccgtatcaatggtatgaatcatcaggtcataaatggcaaagggcgttggttggctcgttgccacgcgtgttttagtgatgttaatcagttgtttatcgggtaagtgatttaatttttgcaaaaatggggcaaaacggcggttgaagccgaccgttaagagccgttctttgctagccgcaagtttgtataattcggcgacttccagtggattttcacttaagggtttatcgacaaaaacgtgtaaaccatggagcagggcttgtttaacatattgatagtgggttgcagttggggtgtgaatgaaaactgcgtcgagtggttgttcgagtaatgtgtcaaatgataggcagccactttctaaatgatattgcgcttgaagctgcgctaatttagccggttggcgcgtacataagacccaatcgacccggtcttgcatctgcgccattacaggtaaatatgctttttgtgcaatgtttcctagtccaataacaccgatttttaacatcattaaactccttaatatgaatggataaatatagtatagcaaattaacaagaaaacggttcaaagtttagtcggaatcccttgtttttttggtctataccatttatactagaggtaatttaaagatagaggtggatggataatggcagtaaaagtattaaaacatgcggtaatctatacaggtgacgacgttatcgaagacggttatattcgtttcgatgataaaattttggcagtgggccccatgttcgactacaaggcacaagctggcgaagaaattcaagatgttaaaggcaagacaatcattcctggctttattgacgttcactgtcacggtggttatggttttgatgcaatggacggcgatgctgaccaaatcgacgaaatggcaactaagatgatgcaaaatgaaggggtcacaaccttatttgcaacaacgatgacgcaatcaaacgaaaacattgctaatgctatgcgcggtgttaaagcagcggctgaaaagaacccattaattcaaggtgttcatttggaaggcccattcatcgcaccaatcttcaagggtgctcaaccagaacaattcatcaaagatccagacgttgatttattggacgaatggaataagttatcaggtaaccgcgtgcgtttaattacttatgcaccagaagatcctggttcaaaagcattcgaagactactgtttagcacacaacatcgtgccttcagttggtcatagtaatgcaacgcgtgaacaaatgcttgaaagtaaagcaacgcacgttacccatttatacaatgcccaacgtgaattcaagcaccgcgaacctggtgtgacaggtcacgcaatgttagaagacaacatgtacgctgaattaatcgctgatggtttccatatcgtgcctgacatgattaaattagcttacgaacaaaaaggtgcagaacggatcgaccttgtgactgattcaatgcgggctaaagggattgctgaaggcgaaagcgaattaggcggtcaaaaagtcattgttaaagacaaacaagcacgcttagaagatggcactttagccggatcagtgttaacatatatcgatgccttcaagaacatccaaacattcacaggttgtgaaacgtttgaagccgttatgatgtcaagtgtcaaccaagccgaagaatttggcttaacacaaaaaggtaaattagaagaaggtcgggatgctgatttcaacatcttagaccatcagcaaaacttagtcgcaacttacagctttgggaacggctatcaacattaatatttaggagtgtgtcccatggaatcacctgtttatattcaaattcataatcaacttaaaaaggatattgaagccggcaagtggtcgattggagatcgaattccttcagaacgggagcttgctttaaatttcgaagtctcacgaatgacattacggcaagccgtacaaacattagttgacgaagggattttggaacggcggattggggctgggacttacgtcgctaatcggaaagtccaagaaaaaatgtccggcgtgaccagttttaccgatctaatgacggcccaaggtaagcagccatctagtaaaaccatttcgttccacattgccaacccatcacttagcgaagctgaaaagctccagttaaaagatggcgagcaggtgctccgcatggaacggattcgctatgccgacaatgtgcccatctgttttgaagtggcaaccgtgccacaaagcttagttgccgatttcagtaaagctgaaatcacgtcttccttctataaagcattagccgaaaaagggggctacgaaatgggcggtgcacaacaaaccgtctcagcccaactcgcctcagaacgaattgccgaatatctcgacattaagcgtaatggcccaatcttgaaattacgacaagtttccttcttatcaaacggcgaacctttcgaatatgtccgcacccaatatgtgggcgaacgatttgagttttatttggaaagataattaaaacgtcctgaaccgataaggttcaggacgttttttttgattaatagccaataaatgtttatatgattaataatgctgaacagactgtaaaaatattaaagtttatgttaatattctacgtggaagttaattaaggattctagaggggaaaaaatgaatagaaaactaacgaagttcttaattggatttacaatggtctcggcgacctttttgtttgctacaaacaatgttcaagctggacaagtgctaacgccagatgaaatgaaaacgcaactaaatagtcaagatacaaaagaagcaacacctataaaagagaaaaaagcgaagactgacgatattgggatgcctattgattcatctaaggttaaaaaggcgattatgcctaaagcaggttatccaagtgtcaataattatatatatcaacacaacccacgcttcttcaattttttctttgtcaactatccaagtgtcaataattatatatatcaacacaactacttacatccaaacattacgcaagatttgcatacattctcaatatttaattataaaacagatgataatcgtcctaacggagtggttgttcattatactgataaccctaataattatagtgctcggagtgaagcagactatgagattaatggtgggtggcaatcagcatttgttcatacctttattgatgctaggacaatattaaacattcatgatacagattatggtgcatggggtagtggggcagttggtaataaatattttgcccaatttgaaatggtaacggctcgtaacttcgaagattttgctaagacaacgagttactcagcgtggtacactgcttacttgttaaacaaatataatttaacgccatctttggcacagaatcataatggggttggtacaatctggtcacatcataatgttacacaatatcttggtggaacagaccatactgatccagatgcttactttgcaaaatatgggtatgacatgaatcaattttatgcattagtgcaacattattatgatcaaatgcctgcaaataaagcgagccttaacagtgttaatgtgtctgaaaatgaaattcatgtggtgggttggcatacagcacagcaaacagccaatcggccatatagctacctattcttattagatagtaagacacataaagaagtaaaacggtataaaataaatcgtgtaaatcgtcaagatgtgcataacatttatgaaaacattaccaattcattacattcaggatttaacaatacattgacattagataataatatgcataataggagttacgttcttatgtctcgctactcgtcagatcccaacggtaataccgacactgttgatttcacatttagaaatattattaaagtacctaagcaagaaaccagtgtagcaagtatggattcattaactgctgataagaagacattatcaatgtccggttggcacgcatcagtggattctagtcggtatccatacagttatttaattgtaattaatgctaagacaggccgtgaatataagcgctatgcaattaaccgtacgcaacgtgacgatgttcgacaagtttatccgaatattgccaatgcaggaaaaagtgggtttggtttgagtattccagtaacaaatgatatgcgcggtaatacgtataaagtaatttcacgttactcaagtacaccaaatggcgaaggagcatacgtagactattcgtttgataatcaggtaacagtaccagcaattgttaaacaaaatttagggagtattgacaccctaacggcaagtttcaataatgttcacatcagcggttggcaagcaaatgatgatgcacaaggccgtaatgttcacactttaattgtaatggatgctaatacacataaagaaattaaacggatgactatcgccaactcaccaagaaatgatgtagctgctgcttatcccgatctatataaggcggggctgagcggattttctgcagatatcccagttgacagtcaattacaaggcaagaatatttacttcattagtcgttattcagcaacggcaaatgctgatgctgattatgtggattatcaattcattaatcaaattggagttcctaagaaacaagttattgaaagtgctgcaagtatggatcaattgtctcgtgtaaataataccgtaataatgtcgggatggcatgctgctaatgcttcgattaataaaccgtatagttatttaattattatggataagacaacaaacaaagaaattcggcgttataaaattaatcgttctttaagaaatgatgtagctgctgtctatccaacattatacggctctaaaaacagtggatttggtttaacgtttaatatcgataacagtttggttaacaaaagaatatatgtgattagccgttattcagataatccttcaggtgagggaaatacggttgattacgtgtttgacaatgccttgaacatctaaaaaatattgccgaacgtcttaaccgtgtggataagatgttcggtttttatttgtaactaaaacgaaatagtgttttaagtaattgtattgtattattagtatgtctgaaaaaactaactaggagcgacttgtgaagtgaaaaaaattgttaagaatagtattttaatgagtacgattggtttaattggcttaacaacaaatcaacgagtatcagcggctgaacaaaaacaagagacagcccctgcattaatgagcagtaatgaaagtattatatcagcaagtagtcaaagttctaaagaacaaaagccatctaccgataattcaactgaatccggtgtaattaaaaatagtgaatcagcagcagaaacaaagaacaaggaagaagttactgtaaagcaaaataatgaaattggtcctggggtttatgatgcgcctaaagtaagtcaaagaagtacgccagcttcaatgaatttattacgaaatacctccagagcttcaatgaatttattacgaaatacctccagttttattagtagtattcatgatggtgcaatttcgtcatggcgcaagtatggtgtattaccctctgtttcaggtgcgcaggcaatcttggagagcggttgggggcaatcgactttagcaacgtatggtaataacttatttggaattaagggaacatacaatggtcagtacgtaacaatgcccactcaagaatatattaatggtcagtggattacagttaatgcgcaatttagaaaatacaatagttggaatgaaagtatcgaagatcatgggaactttttggcggtaaattcacgatatcataatttgttgtggaaaactaattatcgtgaggtaacgagtcttttgaaacaagacggttatgctacagcgcctaactatgatactttgttaaacagtttgattgagcagtatggattaacaagttgggatcgagaagtaacggataatgtcggtagccttgatcaattaactgcaaatagcaataatatccttgcgcttggttggcatgcaattaatgatgccaataatttaccgtacagttatttaattctaattgataccaatacaggaaaagaacataaaaggattgcaattaatcgtggtaggagagatgatgtagcaaatgcctatccgtctattaacacggcagcaatgagtggtattaatgccaacatcccagtagactcaggaatgtatggacatacctatagggttatatcgcgttatgcacaattaccaagcggtgaagggagtgcaaaagactttgatttcggtaatactgtaaaagttcctgcgccaactaagcaaaatttaggtagtttggataacgttaaagttaattcaaataaaatttcaatgaatggttggcatgcgagtgattatgcacaaggaaaaaatacgcattatctgattgtaatgaatgtcgatactaataaagaaattaagcgcttgaaagttaataattcattgagaaatgatgttcatagtgtatatcctaatgtgtataattctggtatgagtggttttagtgctgaattagcggtggataagagtttagaaggcaagaatttctacgttattagtcgctatacaagtaccacgaatggtaacagtgattatgttgactatcaatttcctaatgttgttaacgtaccacaaggcccaagtaatttaggaagtattgatcaacttatccaaaatggtaatatcctccatatttcgggatggcatatttctaagaacgttcaaggcttaaataataattttatcatcataatgaataaagcaaataataaagaaattggacgggttcgcattaataggattactcgaaatgatgtcgcagctgtctatccaactgttgataatgcggcgcagagtggcttcgatattaaagtttctgtcgatgctaaactgaagcagaagaatatttatttaatcagtcgttattccaatagtaatagtggagaaggccgatatgtggattatcaatttattaattcgttgaatattaaatgataaaagttgaaaaactttgtttatgtttaaaattgtagaaccctaatgagatacaagggatttgaaattttaagtgtaggcgaagtttttttatttatttattaaaagatagtggactattaatggcaatattggggtatcatgttaattgttatattaaagaaagcccgagggggatatatatatatcatgagtaaaaatagaaaatctattttgagtgtaatgttattaataataatattattagctattcttgtaggattgtctgcctacgaggggctatatccgtttggtaataagttatggatacgagcagatagttatacgcagtatagtatcttttacaaatacttaagacagcaactagtacataacggaacacttctttatagttttaaattgggattaggaggcagtttctttacaataatgggttattacttaatgagcccactaagttttctcgttgtcctttttaaggatagtcaaattatgctttttatgacaattctaatcatatctaaaatcgttctttcaggtattacattttatttgtttatcaataaaagaataaaattagactatgtttatcgcttaggattgtccatagcgtatgctttgatgtcatttaatattatttatgcatttaatgtaatgtggcttgatagcataatattaataccaattgcgttaatgggtgttgatcatttgatcaataaaggtaagatatggctactaacaggcactttaacactgttattcatatctaatttctatatggcatatatggcaggtatcggtatttttatatatttcttagtagaattaatagtccttcaaaatagagtgaaatggaaatctggcattaagtttctaatttcggtaatacttagttttgggttatcagcgtggctaattttaccaattaattatgcattgaaatcgggacccaaaatacccttgcaagttggattcttgcaacgcaagcagagtatctggatagcattgtctgatctgtttagccataatacgcaattatttgatggcgctaatatatattgcggtatcctgatgttagttgctgtaatagctttttattttatacccaaaataaaaataagaataaaagtgatagtgagcgctttagagatttgtttcttaattagttatatttatgaatatccatatgtaatgtggcacggatttcaacaacccacagggtatggattcagatttagttttttaatcagtttaatgatgatattaatcactggttttgtgattaatatcggcttagaaaatgtactaaaaccattggtatatgcggtgctattatgcagcataatattgttaacgttgtataaaaagcaggtaatagataacgggatactaattatcaatagtgtaatgttagggttgcttactttaatgatattgattggctatattttctataaaaatataggaataaatataatcaagtggttaacgttagcccttattatgacagatagtattcaaaatatgcattttgttattagtcagttggatagcttacccggatacgtcgctaccgaaaaaaattggaaagaaaatgacagtcaaaatttaaagactgctttatcttatttaaagcaggaccgaacattctatcgaactgtagtaacgccaaatgcaatgctaaaccaaggaatgtacaataattttaacgggtttagttggtttaacacttttggatatcagcaattagctacaacgttatctcaatttggatatagtactactttggggaataaatcactggcatatcaagaaggaaatacgattgtggatagtttattagggctaaaatatagaatagcattgatgaatgattctatgacttctattggataccagaaggtgttcaatagtggaaactatgaagtgtatcagaataaaaatgctttaccgatcgcaattattaatgacaatctaaccattaatcaaccactcgaaggaaatgaactacagcggcagcttctcttttttaataaaaataaaagaagtgcaatcattcgaacaatagataatccaaattttactgttcataacgtaaaaataaagcaaaaaaataatggcattcagttgagcccatatggtaagaatgcttatattgagtatcggattgatatgccagctaattcagaacttctgactaagatagctgtaattgatggtgttaattcttatggtaaattagattttaaaactaaccagattatacgaaataattatcctaattttcataatgaaggtgtattgagtctttataagagttccaatcacaaaagtaatgcatttgttaaaatgcgcttaaaaggaaatgtaaatatcgcagaatctcctaaatttatactacttaatggagatgccctaacggagaatattgaaaagttacgaaaagaagctccaaaggttataaaaaagagtgagaatagtattgaattacaagtgaatgctaaacataaagagcctgtctttttttcgattccgtttgataaaagttggaaagcaactgtgaacgggaaatccgtgttacttgaggataatcatggatttatgcaagtaccagttgaatcaggaaagagcagtataaaactaagatatattccaaaaggtattaaagaaggtttcttaataacaagcgtgacagctttaatgttgatcctttttggaattaaacagcaactagaaaaaagagttagtagggaataggtaatgaacacagagagcagaataagattaaaatggattgatcgaaaaagactaagagagattatggctcttttaggaattagtatattggtagtacttcctttttttcttactagaggagtagttagaggtagtgagggtgaggattggacgtttcattttgctagaataagaagtttactgggatcattaaaggcgtatcagctgcctgtagaagttaattttttagaattttcggcacagggattgggagtcaattcaatgtatcctttcttttccttgtatctttttatttggccgctattattaccgataaaacttagattaaaagtatttatattcgctttgttatttaacatttgtgcttctgcaaatatttttggatttatcggggaattcaccaataacttgtggatcaagtcttcaattgcagttttatatttatttaataattatcacctagtactttcatataagagatttgctttaggagaactacttggctatacaatgtttccattggtggcgtggggaattgttaagatatggaaacgtcaaaaagttggaatacttttgcttgcgttaggtgtttcgctaattgctaattcacatattctatccttgttgtttttgattgtagtattaatattggctgaaatagttagattattaatgcagaagtttaattgggaagaagctcggtatatttgtattgcagcggctttgacaatcccgatgtctgcagttactatttataattttttagtgttaagtatgcataatcgatacttagcacctaatatttcggcacctctaaatgaatcttctatctttccgcaaacatatattgtggacttaaagcatacacttcatccattagcgcttacggatttaaatgcaagaacatggaatatagggaccctttttctaatattggcctttattgcaattatttatctaattgtaagaagaaaagataacgacggttattatgcatttgtaggaattatcggactcttactagtgattggtggattcgattttgtgaattgggattttacagaacaccttaaaatatttgagcctattaaagtaattcaatttttgggtagattattaatgttagcggctatattcttagtggtaccggttatgcgtatgatgattaaagtcaaggcgttgtgggcgaaatggctaataggtgttccaataataatctttctaattaatggtatgatgacaatttatagaactcagaatttttatcaggagatagtgccgactaatattttagaaagtgggtataataatcagctgcatactattgattattttccggctttttctggaccaaaaagcggtgtggactatgcggttaaagctgcgtatagtgatattaaaggaccgattatgtttggaaattcagtgccatcctttaatagtgcaacatatcatatgaggatcaaacacgtagttatgaataaatatttagtgacgccagtagcggcctataatagatttaactatcgggtgacaattgatggacagacagtaaaatggattcataaccaaacatacggaacaatcgcaattagttctaacgaattagtaaataaaaaaaaggctaagctttgtgttgttgcaaaaccattgaaaaatgagtggttagtaatgatcattgcgggcatagcaaatatggctgttatgttgaggttgattttggattttaaacggaaataggtacaacactgactagtgtcatgcaataataataagatggatactatgagtttaggaatcatggtattgaggccaaaaaagttggaggatttcacatggagaaaataactaaaaaaaaggaaatatgggcgattattttaattgttattttattaatagcgctaaatttatcgattaatttaacaggaaatgggatcacacccaatggtggcgatgataaggcgtttgctcaatttgttctaggaaaacactatctacaatttttacatagtcgatatacgggatggtcttctcgactagtaattgaatcggtattatcaacattaacgcacttaccaattctgtggcgattattaaacacattggcaatgtttactgttatctatatcccgtatctattgcttcttaaaggaactgatgatgatgagaatgctagtcgtctattgattagttttgggatgttcttcttattacctttcaatatgttctacgagacagggtggatggcaaccacaaccaattacctatgggttttagctgccggtttattagcgatgctaccttccttagctcaatatttaggaatagacattaaacataaaaaaataatttcagttgttgctttcttagccttaatctatgctgttaatcaagaacaaatggtaattatcctattattgggtaattcattgttattgtacgtaacaagaggaaataaaaaggcactggggagattggcatttcaattcgtagttactgtattgtctttgattatgattgttttagcaccaggaaatagcgttagaaaagtcaaagaaattcattggttaccattatttccaactttgtcaccctttaaaaaaattgagttaggtatttctagtacattaggtcacttctttttttcatttgatgtgcttgcgacaatacttgtgattttactttttgcgttttatataaatcagaaggggagatataaaataccgcgtacagttttctatattccggtactgttcagcgtgattttttggtttaaagatactttgattggaaaaatttatccaggattaaagaaaatggggggtgctgttactatttatgggacagatatctctttggccaatttacaatctatcttgccagatttacttctgattgtagtaagctgcattgttttattggggatattttcttcgggaaactctaaacgaatgtggttagttatggtagctatgttactcggacttatttcgagaatcatgatggggttttcaccaacaatttgggcatcaggagaacgaacattcctatttttatatgaggcacttatttttggttgcttctatttatatgatcaaattgagaaaaagaaagaatatcaaattttaacgcacattttaattggaattggtggcctagctttctgtgttattttatatacagtttaatgagtttgtagacaataacaggttatccgtgagaaactgaagttaaaattggatacagatatataataggcactttcgataaatataaaatttaaatcggaagtgtttttaatttagctaataattgatacccctatgaaactaagctagaatgcattaggattttaaacttaggtatgagtggtggttaggctggaaaagcgacgtgctagtttatacttggcgcacgtagttacctaattttacttttatttatttgtttcaaaaaatggttgcagtttcgtttaaagaggctttccattgtaatctcaagctaataattgaagattttataaagtctagaaatctttaaagaattccttagatttacaggtaacgaatagtggttagacactgtttatgctacaataaaatagattattttaaattactaagaaacggagttaagttaaatggaaaatggtgtgggatttaaatctgtgggtgttgtttttaaaaaatattggtgggtcatttttgtaacaattatcattggtggcgctgttgggatcatgactgccaaatcaacaattagttacgaaacaacagctaaagtatatgttaacaaggggtatgtcgaagacaaaaaaggtaacggtatttttgataacgatgttgagcgtttttggcaatcaattaatagtttaagtaagacacaaagctttaaaaaggctatgactaaagaggttagagattattcaagcgataatttgttaattgatagtagcaacggatctaaagtcatagctgtgaaatatactggcgctacgcaagccaagagtattaaaggtgctaagtatgcgacagagcttttgaaaaaagaagtgatcaagtatgatgacgagaagagtaagttagttgtgattgaccaggcttcaaaagatacaactgcaacaataggctttagtaataagaaaacaaattctattatgggcatcatctatggtgcagtattgggcttcatcctcagtgctattcattttattgttatgcgtagaaagaattaggagggaacgatttggttaatccgttctttatgttcattctggctttttcagcagttattctaagtttcttttttggctggtccagtatttatccaagtttttcgagtgatgttattttcttttttattgtaatgttcttgttagccggcgtactaggatactttatctataaaagtaatgtgatatcttttaagaaaattaagagtacaacaaatgttgtttggttagtggttattgttttaataggcacattagctgaaggagcctacaatcatggttttccattacagtttatgctccaaggtaaggattccggttatacagaatttggaattccgacagttcacgtttttttactcactctgacagcttttttaacaacctacttgtggcatctaatcctctcttcaactgggaagttgagaaatcaatatatactactttgtgttctaagttgtattccgtatgttttagaagttaatcgcggaatgttcatgatggtgatgataaactgttttaccatttttattctagcaatctggaagaaaattaaagttagacatataattggtttagcgattttcggtatggtgggtctgtttttatttggtgttatgggaaatgcacgagtgaacacgtcatatcaaaatggtcgatcagcttttgattcagcgtcaattatgcaaatcggtggtgcaactgaaaaatttaaaagtagtaagattcctaaggagttcttttggggttatatttacgcttcatcacccgtggctaactttcaaaaaaatgtagattatagcaagactactgaaaaaataacagtttcaaaagtaaatagtatgttttttggtgagttactgcccaatttcattggtaagagagcacttgctaattcagattataaagaggtcaaaattcaacaaattacaccagaattgaatgtcgggacagcattaagtagtccttaccgtttattggggtggattggtgttactatgtacgtcattattatctttgcgggtgcatacgtgtatctgtacttcttatataagttgaattcaagatttttcattgtcgggttatccgtcttaaatacaatatttgcattaactatttattcaaatatgattcaagcaactggtttgagcttacaactagcatatccaattatatttgcactaatcgactcatacgcagattattctaataagagttacttgaaaatttaggaggattttgatggagacaattagtttcatcctaccaatctatggtactgaaaattcaattttagaggctgggttggaacgcttaaagttggcgaagacaacttcatttgaattcttactaataagtgatggcgctagagatgatttagtagcaatttgtagacgcttttcagaagaagacaagcgttttaagttgattgaacaagctaatcagggcgtatcggttgccagaaatacggggattaaagctgctaagggaacttggctgctttttgttgatccggatgacttattagcagagaaatttgaagaaatattgttagaaaaagcaagtactaacgcagatgttatcttttttggttttgatcgagtatatcaagacggtaaagttgaaaatagttttcctaaagataagctatttcccgctacaccggtatcaatggatgatttaattcgtgcaacgctttcggatggcgcttattataatggcatttatggatattttcttggaacaccatgggccaaaatgtttcgaaagtcttttttagaagctaatcaattattttacccagcaggaattattaagagagaagatgcgttatttagcattgaggttttcttgaagaaccctagaattaacattgttgattcgatactgtatcactatagaattgatcatgataattcaattagtaatagttaccgacaaggggttaaggaaagtttcattacagtttcgaatgatctgaacgatgatttagtagattggttacaacaatcagataacgcattatttttggattcttatatgttgagactctcgattgaactcttgtttgcagatttttgtaatctaagcaactctaagtcatatcaggaaagaaaaaatgagtttaagacttatctagaaacgcctgttgttagtaagcaaataaaaaatgcgagattagtcaatatgccaatgaaacagaaactattaggattactgattaagcagagaaatttctatttattaaattatttattgtttaaaagaaagcgtggataagaatttgaaagttgcagcagttattgtgacccataatcgtagggataaattagaaaaggcgattgatagtttattagagcagtccgcgccagttgaaaaaatagtggttgttgataatcaatcaactgatgatacgctagattttttgaaagcaaaagcgcgcgataacgcacaaattaaagtcattcattcagaagataatttgggtggcgcaggtggctttaatatggccttggcggcaactcttgagttgcctgaaattgattggattagtatcgctgacgatgatgcagtctatgatcaagattatatgaagaaaatggctgaacttagtgaaaaacatgccgatatcggttgttttacaggaactgttatcgaagatggtgaaattggaaccgaacatcgtgttaaaattgatgatttggaccggctacaattatctaaaattgacttaacgagctatgaaggtgattttccagttgatattgctacttttgtaggagtttttttgagaaaagatgtgctaaagaagattggcttaccggaaaagaatttctttatttggtatgatgacattgaatactcacttcgtattcgcaaggaaacagaaatgatcaataatatccaagctaagatttatcatctaacagataataatagtgtcggagcaagtggtgttaatcgtccaattggctggaaggactactatggttatcgtaatcgttggcaaactatgaagttacattgtgagaaccaacaaattctagctaagcaattacggtatgaacatttcagatatgcaatgggtgcctttttaaagaaaaaaggccaatattctagatttgctgccgtcaaactagttaatacagcctacaaggattttaaaaatgaaaaaatgggtaagaatgatgcattcttaccgttttaaatgaaagatttggtgagacagagtgactaatatttctgtttgcatggcaacttataatggtgtcaaaaccttacccaaacagataaaatcaattatcaagcaattaaccgcgcaagatgaaattgtgattatcgatgattgttcatcggatgatacaatggggttactgagggagttgttggtcaattttaacgggcaaacaattctgaaaagaaacgatcagaatatgggaccaattaaatcgtttgagaaagcactaggacttgcgacaggcaatcttgtttttctttctgaccaagacgatgaatggcatgatgataaagtggaaattattcaagatgcttatgtaaatgggcacgctgatttaattgtccatgatgcaactgttattggaaagaatggagaggttgttgatcagtcatggaatcactacaaccataaccaagttgaccaaagtgtatttagtaatttaattaaaaatggttatactggtgccatgatggctatttcgagacgattattagatgccgcgttgccttttccagaaaaaatcgaaatgcatgatcagtggctgtttcttgttgctaaaaagaatcattttaaaattacggcgacttctgctactttaatggactatgttcgacacggtggtaatgtcactggcatgagtaagagaaacaaaaaagaaatgttgattggtcgcttaagaatgctgaatacttatttaaagatgaaggagtcctcaaaatgaaaggtattattctagcaggcggttctgggacacgtttgtatcccatcacacgcgctttatcaaaacaattgattccaatctatgacaaaccaatgatttactatccaatgtcagtgctcatgttggccgggattcaagatattatgattatctcaaccccaactgatacaccacggtttaaagaattatttggcaacggcaatgacttagggttaaacatcgaatacgccgttcaagaacaacccaatggtttggcagaggctttcgtgattggggcggacttcatcggcgatgattcagtatgcttaatcttaggtgacaacatctattatggtggtggcctttcagaaatgctccaaagagcgaatcctcaaagccaacccgttcgactgcgcactcttgttttaaacgtgctgcttcgaactgccttttccggttaacctaaaaatacatactatggcttaaacccgccataatatgtatttttctgttaatcctcaaagccaacccgttcgactgcgcactctatagtatttccccgttgcttttaatgactttttggtaccagtagaaactgtcttttggatagcggtttagttctctttcttctgtttcgtcgcgatccacgtagacgaagccatagcgtttttgatagccgtttgtccaacttaataaatctgtgaagctccatgtcgtgtaaccgatgaccgaaacgccatcggtaatagcttcgtggatggcttgaacgtgcgcctttaaaaaggcaatccggtagtcgtcgtgcacttgcccgccttctttcaaggtgtcataagcccctaaaccgttctcagtaattaagaccggcagtccataacggctctcaatacgtctgagtgcgattcgaagtccttcggggtcaatattccaatcccagtcagtttgttgcatataggggttatcagcggtcttatagacgcctggcaacccacttgcttggctagtgccctttttaccggaagtattttgcttggtcaagccaacgccaccttctaatggattagtcgtaaccgtcatcgtctgatagtaattcaaccccataaaatcgggatgtgcgagtggatcggctaataaagcttggtccgcttcagtaatttcgggtgcaatcccgtttcgttcgagataagtcatcactaatttcggataacggccccaagcataaacgtccatccacaaatcagcgttaatttgttcggcattatcagccgcaatttgattttctgggtccgcattcagcgcataagttgggctgtaggcaaaactaggtccgatgcccccttgatagcctttttcatggaataatttaatcgcactagcattggcaaggtttgccatatgattagcttgataagttcgcttagcatcagtcactgctggcggatgctccgctgttaaatagccgtgagtgatgaagacattttgttcgttcaaggtaacccaatgttgcacacgatcgccgaagcgttcgaacaataagcctgcgtagttggtaaaatcttcaataatttgacgcgattcccaaccgccatattcggcttgcaacgcttgcggtaagtcccaatgataaatcgtcacgattggttcaatatcattggcaattaatgtattaattaaacgatcataaaaggctaagcccgcctcattcacagcgcctttaccatttggtaagacccgtggccatgaaatcgaaaaacgataggctttgagcccagcgcgtgccattagcgccacgtcttcttcgaaacggtgatagtgatccaccgctacatcaccattcgtggctttgaacgttttgcctggaatgcggacaaattcatcccacacagaccggcccttaccatcttcttggtaggccccttcaatttgataggctgcagaagctgaaccccacaaaaaatctttaggaaatggtgctaattgatggtattccattactggtcatcctactttctctcaaagtcattgcttattgttctgcttgatatgctttttcgatttgtttcaacattttcttaaagccgcgtttacgcatgaaacccatgacaaaggccatcaatatatcattggtttgttgtaatttgccatttactttggcattttcgcgatagataacttcaatagactgcggtccattcgcgaaaatatcgtaacttgattgatagctcccctgggtagaagtcgtttcgtagtgataactctgatctttaatcagttgcgtaatcttcagtgtcgcccgattcttgccaaattgcttgtcgtacgaataattaggcaactgcgcttcagttagtttatccccagtttgttgcttaatatcaaacaacactgattccagaatcttctgataaaaataactagctggtatttttaaatttaatttaatttccatcccgttcccactcttctcttcaatgtgccatttgttgcttttaactaaaaagggctcgaacaaaagtcattttgtcctagcccttttgttcattagccaaactttaatcgactggtacaccggccatcttcttgtaaacgtcaacgacttcgcctgctaaatcgcggaaagtaattgcgttcatcaagtgatcttgtgagtgaaccgtcaataatgtcacttgcatgtgatcgccacttgcttctttggttaacatatctgtttgtgaattatgggcttctgataaagcagcatccgcttctgcaagtttggcagctgctgtttcgaagtcacctttcttagcggccatgattgcttccattgagctactcttggcgttcccaccgttgataattaagcccatgattgcttctaagttctgttcttctgccatagtatggcacctcctatgatcatctcatcgtgaaccactttcgtaaccattcattaattggtctagatatttcttcgagaatgactaaccaatccattaaaaggctttcaaaaattagttcctgattgtgagagttcgccactatcgcattttacgaagcgaaagaaaacccttacttatattgtaatcgcttcctgagatttgtcaattaattactgataaccttttcacaaacggactagtccaaaaaaaagaaaccttaacaggttgttaaggtttctcgctcaatctagattagaccactagtcattatttttcttatggtagcccttattcttttgatttcgtttacggtttttcttatgttttggttttaatggtgcagctggctgttggcgaactggtactaatttggctttgcgcgcgcttgtcgtcggcgtagccttttgcacttgtccttctgttgcttcaccagtagttggtacagcagatgttgctttcgttgcagcaactggtgctactttaggcgtcactggtttttcggcttccaaatgatcaccaaccaaataacgggtcacaagatcatattcaggcgccaataacttacgcaaattccgcccatcgtgttgattgcccaacgtcaaaacagtccccgtgcgtcccatccgaccagtccgaccagcacgatgaatgtaagtgatttttgcgtttggtacatcaaaattaatcacataaggtaagtcggtgatatccaagccacggccagccacgtccgttgctagtaagagttgaatcttaccttcacggaaatctttgagcgctttttggcgttctgtttggcgaccttgccctgagagtgcggcatacgttactttttgatgttttaacgtttgtgcagcttgtaagagttgcgcggattggttaaaaatgaccaatcctctaaaattcttttgatgtgctaaatggcgtaagacgttcactttttgagcgttaccagttgggataaatgcatgcaacacttccccacccgtcttatcaatcccacgcacgtcgattgtttcgattggcacgccgaaccatgtttccaactctaataagatatcggttgatgtcgctgaaaagaagccaagttgcacatcggcaggtgattcttgcacgatatggcgggtttctgaaagcccgctatccgtcaataattcgtcagcttcgtccataataatcgcttggagtgtatggaatttcactttccgttgttcgctcaattctaataaccgaccagtcgttgccacgataatctctggtttggccttaagccgttcgatttggcgtttaacattcgccttccccgtaatcgcttggacattacagtcgattgccttggcataaggttgaatgacgtcccgtgtttggatcaccaattcctgtgaaggggccaaaattaagacttgtagcccttcgcccggcataattttttctaataacggcaatgaaaacgcgagggttttcccagaacccgtgggtgccagtcctagaattgattggtcttttttcagtggttgataaactgcctcttggatgggtgacatttctgtaaatccttgctcatcccatagtgcttgaaatagtggtgaaacgctcatgtattgcctccgtcatgttaatctgcatcaaatgttattccggccgactgtcttaattgatataaaacttggttgaccgattcacttagctgtaataattcatgataccgttttgtgtcacgattagcaatcatcgccgcgaaattttctgcctcagcaaccattggattagcaagtgattgttcccctagtgactcaatcttttgcccaccttcgctgtagcggtcaacactgccgattgtgccggcattatcgaggacaatcgtcgtttggccaccataaatttcagacgttagataggaatcaacggttttgccaaaaatcaacgtgacgttaaaggttggataacgcagtgttgcgacccctttaccatccactccagttggtaacaattcagcttgataatcgactgaatcgggcacaccaaaccagctgacggcatcatagacgacatacacgccgagatcttgtaaagctcctccagaaaaatgtggtgagaaaatattcggttcttcacccgctaaaacagcgtcatagcgtgatgaatatttcatatagctcaaggtcgcgccattgatcgccggtaatgcgttgatggcttgttgtacaatcttaaagttggcctcatgaatatgacgtgctgcttcgaataagaattggtctggatgttgctttaataatgtttgcatggctgccatttcagccggattactgaaggcaggtttttccacgatgacatttttacccgctaaaattgcttgcttcgcttgttcaaagtgcagactattaggtgatgcaatgtagacggtttcaaattcattggcattcataaacccgtctaagtcagtgtaacttgtggcttctggtgcgtgatacttcgttttaaattggtcggctttatctgccgtccgtgaataaacagctgttaacttaaatgattcagattcccgggccgcatcaacaaattgtcccgtaatccagttagtcccaataatcccaagtgtttgcattataatcagctcccttatttaatactgccagtatacgggatttagatctagaagcctatcgaaaagtttttctactgataagaattccgccactattcacttctttaaccattccttaaaaaaacagtcgtaagtccgataattaattgtccgcaaactaactatttcgtggtagaataatagtaagttggggtgtgacttatgcgattttttaaatttcaaaaaccacaagcaattttaaatcaaaccattcaccagtatcagcaaaaagttcggacgactcaagcgagtaaagtagcgactttttatgctggacactggtcttttaatgacaaccaaacccgaaaaaaacacacattagaaattactccgaacttgttggtgcaaatcgatcataagccattgagtggtcaagtcatttccctcacggaaaacgaattggtctttctcgatcactacggctatcaattaaaaattacttgtgaaaatcaacggcccgtttcaatttacgatgaagccgaagatatggattatccaatcgaatagctattaaaaaaggcccataatgctcagcgttatgggcctttttagttattctttatttgttcaacattttttgagctttatctgggacttcgtttttggcaaccttttcccatgaaaccacacccttatttttattgacgattaatttgaggtacgcatttcgtttaagcggcgttgatttattaccattaaaatcaacttttttggtaacaccatcttcattgtaggctgcttgttgatagttataatcgataaccgtttcccctgctgaatccttttcttccattcgtgttccgtttgaaacaatctgtgtatagtaggcttccccaccgtaataatagctatgaattccccaactaccaccgatgaaaaccaccacgattgcgattaataataaccagcctttgtgtttaatcattattttctctccgtttctatttaatagtctgccattgttgcttggtgccagtaaaaactgctaactgatagttcgtctgattatcactgtttggaatctgactagccattgtgtattgccagaacccgttcttagtcgccaatgttggctgttcccgcgtagtttgccacaatggatagtctcctttgtgtggcacataccgttttaataagctgggtgcaccaccaatgagacaattttgatgataatgttgattaatcaaggtcactagctgcgccagtgccatttgcgttttcttttgtgcgggcggttgttgtgcatagtcgttataataatccaaatagatcataattggtaaatcacccgtctggctgccaactgctttaaaaagttggtcagcttggcgttcaggcgaactatcaaaactaaaaaaatgaaagatgcccacgcgtaagccagtgccacttgctcgactgtaattggtgtcgaaattatcatccttgtaactggccccttcagttgcttttaaataaacaaactgaataccgtccttttttaacccgtcaaaatcttggtaaccatctgactgacttaattgcatccctagaatcggatattgcgtcgcgcttggtcgatccgaacggtgtttcaaccaccagatagcaccaccaagacacagagctaccgcgataatgccgataattatttgtcgccaatagcgcttttggaaactgtcttgaaaaatcggtgtcacttttcgtctcatccacggttcctccatttccagccttagtacgcttagtttactatcttcatgcattcgagacaagccacctaacaattttgttcgttactgtcacttagagttgccttttattggtaatcagatacaatgtgaacaaagggaggcggaatatgttagatgaacgcttagtggggttaacgtttactttacaggatgctaaatcaaccggcaccgttaatttttttggcatcttatatcattaccgtgtcgaaggaccagctagcgctggcttactcgtcatggtaacggccgtcacacctttagctttaatcgtgacagcgcaccacaatattctgacgtattaagccagacaaaagggagtttttattatgggtattttcatcagtattttagtcattcttgttttagtgattgttgcagtcaccctcttttcatcatttgctttgattcataccggggaagttgggattttggaacgcttaggggtctacgttaaaacgcttgatcctggtttccatttggtcattccattcatttatcacatcacagaaatcgttaatatgaaacaaatccccttaaaagtcgctgaacaagaagtcattaccaaagacaacgtggttgttatgatttcggaaacgattaaatatcacatcactgacgtcaatgcgtacgtttataaaaataaagattccgttctaagtatggtccaagacacccgtgcacaattacgtgggattattgggaacatggacttgaacgatgttttaaatggcaccgaaaaaattaaccaaaccctttttgaacaacttagcgaagtaacagccggctacggcttaaacgttgatcgggtcaatatcgattcaattcaagtggcccacgacatccaagaatcaatgaataaattgctccgtgcttcgcgtgaaaaagaagccaacattatggaagccgaagggctcaaagccgccgcaattcgtaaagctgaagggttaaaagaagcgaatattctagaagccgaagccaataaacaaacacaaattttggaagctgaagggaaagctcaaagtgaacgaacaattgccgaagctgttaaagatcaaattaatttgatcaatgccagcttagtcaataacggcgaactctatcttcaatataagaatattgaagcgatggaacacatcgcagacggtcaaaataacaccattgtcttgccaaataagtcaatcgatagcttgggtaatttgccagcaattggtgctctagttcaaaaagaaagtaccaagcattctaattaatgaatgccaataaaaaaggccccagaataacaaccttactgttattctggggctttttttattggtcctctgaaggtgttgaatccttaggtgttggttgtgtattgcgggtgttctttttgctgagaatgtattgttctaacaaggccacaatctgttgattctgtggtagatcagagtgttgtgcttggtcacctgtcaccgtaatttcggtgtagtgcttgacttgcccttgataaatgtacttccccgcctctacactacgcgcgggtacaatcccatcattttcaaagttttccgttcccgcaattgaatacatcgataagttcgtcggaatatttttacgtttcttaatgaaatccgtcagcatctgtgacttatgcgtaatcgatgtttcggaaaagttatacggcgaaccaatcgtcatcaacttcttcactgtaatatcatcgcgattaaaataatcttccaaaaaagctgtataaattaagccgccattagaatggccaaccgctttaaagttattaaattgatacttcttagtcaacgcggtaaatgcgagcgaaaaccatttagcttgcttttgaatattactataaccgtccttattgttttcaaaaccaaccacgataaacggttcattatcccgcggtttaatttcccctgaatagctaatctgattattttcatgcacagttagttttaacaagctgtgccgattcccgcggttagcgttcaatttagccactaattcatcaaaccgattttgggttgcactactccctggaataaaaattaccggtgacattcgtgaatcatggcgcttagctaaggtcatcacgctctggcgactccattgagcagctggccacattaatccgccgatcaaggccaaactaatgactaacaaccagaggcttttttttcttaatttggccaatttatgccgcctcctttacgagtgctaattgatctgccaattggacaaacggcttgtagatcatcacgccgacgacaacgtttaataccgtcaccgccagcgcgactaaatcaccgttggtgcccatgaacgcttgcaataagccgggggtcccaagtggaaccgtgaagactaccgacggcatgagattcaatgcaactgctgccgatgcaatccccatatttaccagtggtaccaataagaatggaatcacatacaagccatttccaatgacaggcattcccacaaggaccgcgctattaaagttaaataaaacgggcaacagcgaccatcgaccaatcaaatgataatccctttgtttgctgaagatgaaaacggcaatcactaaggctaatgtcccacccgtcccgccaatcgcaccaaagggttcatacaaagtccctaacgtgaacggatatggaacgtgccaagccgtgtgatgactaaacgcatagtttaagttggccgaagatgcgattccctcacgcccaaattgggccaatgttggcatactcgttaatccaaaaaaagttaagctagtggccgctaaaccagtccccaacgtgaaaagcagacccgtttgatttgcttttagtgattgtaatcgtaagatgacttgatctggcaagattgaaatcgccaaccaatttagcaggatactcagccctaaaatgacgccgagcaccaataaaatcgcccacatagaatccaatgaacgtcctactgctgacccattcagcggtaaatcacgccgatgaggtcgtcctaattttttgaaggctaatccagtcagatagccgactaataggccaaaaaataagccccccattcccaacatctggctattgaaagataagccctcatttggcgtcaaccgtaacgctaagattaaataggcaatgagccccgtaatgctggctaattgttcatcacgcttatagtgtttggctgtatagcgcgccgcacacatcgctgctaatgccgcaacgattcctaacgtcaaactcgtaatgctgtcaaacatcatctgaaagatattccgtttactcaaccaattcgaaagatgaaatacattcacaacaaaactattccggttaaaaagtgctagctggatgagttggctgatactcccaatcaagacaaatggaaataacaacgttaaacttcgctgcataatctgatagaccgccgcggattggaatcggttaaaatgttgcgctaagcgcatcattatagattgttttttgacattcatgcgttaaccctctaaacatgttttgataatttcattctagccgaccttccgcttaaatgcacgtctgaacgcaaaaaacgggtcgctactttccatctctggataataacgacccgctaaaacgtgcgccataagccatcttcttccggttagctacatcagtcaaatcaccaactttgttggtaattcgcctgatgctaagaatttaacgttggctttttaaaaatgatttattttatagttgcgtactaaaaaaatctgtaattatgttcatcagcgctggcttcaccagatggcgttcaccatttgctgttaaaaatgtcacgtttttggcataagtttgacctttaatctgctgttcaaaagctgctacttgttcatagggaattcgttcatctgctgtcccatgccagaataaaacaggccgttgagcaattgcctgcggctgttcagttaaatcgtaggccgttaaccaacttgtcaataaccctagatcgtcaggttgtgctaactgatgcgcacggatattttcacgaactaagcgcgcataggctagcggtgccggcgagcccatgatacaagccgccactttaatttctggatgcttggttaagagtgccgccgttgtcatcccacccatggaaacacccccgacgccgatgcggtcagcttgaattaaattaagttggtgccagtaatcaacaatcaaactgaattcggcaaggttggtttgaatactttgccaaaaagtccatgacggaatctctgaaacaggttgcagccgttcaccatgattcagtgcatccggtaataccacgcgcatcccagcttcagccagtttacgcgcttgcgttaaaaccaattcttttgctgaccgccagccatgatagtaaatcacgagtggtaatggctgatgacgttgttcgtcagcgaccacttccaaaaccggaatccctttaatctggcgttttaagactaataccattagtgaaccctcccccactatttcaagattactataacggaagttggcggggttgtcatcgaattagaatttttcgaaaaataaaaaagccaccagattgatttaatcgggtggcttaaatgtgctccaggcatattcctgcgcttaaccaaatttatcaaatcgacgatgacatcgtcaattcgccaaatccagttaatgctcaaatataaccgcctgcttgcacactctgatctgaaacgtgctttttgaaactgacctttccggttaacctaaaaatagcggttatggctaaaacccgccataatcgctatttttttgttaatcctcaaggtcaaaccgtttcaaaggcactctgtttttaaacatgctttttaaagctgactcttgtgctttgctacatatcgcaaacaatcgactgcgtcgcttattcacgatattaggcaaatgctcagagtcaaaccgctttaaacgcactctacattgcttttggtgcttgtacgcctaataagtctagtgaggcttctaggactgtgctgacactcttcactaatgaaagacgcgcatttttttgatcgtcgtctgccaaaatttttgagtttgcgtaatacttgttgaaggcttttgccaagcgtaatgcgtatttggcaatcactgatggttcgtattcttggctggctttgacaatcacatctgggaagttgccgagcatcttcaagacatcccaagcgttggcatctgaaacgactaagtcagcgtccattgcgacttcttggttggccttgcgcaagatactttgggcacgggcatttgtgtattgcacgtatggacctgtctcaccttcgaaacgcacaacttcttctaagtcaaagtcaaaattatctaaacgatcattcttcaaatcatggaaaataaccgcaccgatgccgacttgttttgcaacttcttctttgtttggtaaatcagggtttttggtttcaatttgttgttgtgctaggttaacggcgtcatttaaaacttcttccaataagatcacacgaccgctacgcgttgataatttcttaccaccttgagtaattaagccgaatggaatatggtgaatttcgtccgaccaatcgttgcccatttcttttaaaacggccttcatttggttgaaatgttcccgttgttcgccaccaacaacgtacaatgattgcacgaagtcgtatgtgtcatgccgatacatcgcagcggctaaatcacgtgtcatgtagagtgttgcgccgtctgattttttaatcaaggctgggttcaagttgtaagctgttaagtcgacgatttcagcaccgcgactttcttgtaagagcccttttgcttcaagtgcgttgaccacaccgtccatcttgtcgttatagaaggcttcaccattaaatgagtcgaattcgacccctaacatcgtatagatcttttggaattcctttaatgattcagttctaaaccatgaccataacttcgttgcttcttcatccccggcttcaagcttacggaaccatgcccgtgcttcatcgtctaattctggatgttcaacgtcttcttgatggaacttaacgtaatatttcaaaaggttcgtgattgggtcttctttaacttcttcttcactcccccattttttataagctacgattaatttaccgaattgagtaccccagtcacccaagtgattgattttaattgggttgaagcccacttttgtcaaaatcttggcgattgagttcccaatcactgttgaccgtaaatggcccattgagatgggtttagcgatgttgggtgatgacatgtcgattggcacgttgccccctttaccgaggtcactttggccgtaattagcggcttgcgttaagacggttttgaggatttggtcgctaaacgtagccttatccaagaagaagttgatgtatggcccgttggcaatcactttttcaaagccggcttgatccatttctgcgactaagtcttgggcgatttgttggggtgctttccgtaatgttttcgctaagataaacgttggaaaagcatagtcccctaagtctgatgtttttggtgtttcaatgagttgtgctactttatctgctggtaaactgtcccctaaaacgcccattaaggcagtggtgacttgttgtttaaaatccatgttgatagcctcctaatatttgtgaacaaaaaaaagtcccttccaaataaatgaaagagacgagaattcccgcggtaccactctgattgatcaatcgatccactcaatagtatgcaattgttcaaccaaaagcgcgccgcgtcaacttgattacccaccttacaccgtctgtgagctcgctataaatcgctgttgatgctattcttttgactgttcgaacttgataactagtatatagaacttagctgcacttttcaagcgcaattattctgccgcgagggcttcaattggatctaacttagctgccttacgagaaggtgctagtgccgctaagagactgatgataatgctgatgattatcccgaataggacgtagccactggtaattgccacaattggcatatgcgttaatggttgggccaacgtattgacaagcaattgtccaaggccagcaatgccggcaccaagaacacttgataataacccaatcaagaaggcttctgagacgaataagtgccgaatatctttctttcgggcgccgattgcgcgtagaatcccgatttccttcgtccgttctgacacactgatgtagagcaccacgataatcatgattgctgaaaccaataatgaaatcccggcaatcccagctaagacgtagaaggctaacatcaagtaagtgttaattgaatcgaggatcgcaccaacccctgtgatttggtaatccttttgtgtcttaccgttgactttgctagtgtaggttttgattttattttgaacggctttaacattttgggtcttattaaccgtgactgctgcaaagttgggtgcaaactctaatccttgcgcttggtacatcttggctaatgtgccatatgtgacggcttcagtcccagaattgatgatccctgaaactttcacatcttggcgcatttgaactggacgttgatccttactaatggcattgacgtaagtggttactgtccgaccaaccatcttcttgtaatttttatctaacttcttagccattgccttcgttaaaataatttcgttggccccaggtttagtcccggtcttaatatcttggacacgttcggttttattaaacgtttggaacatttggactgtttcactcttcttttgatagtgcacttggacaccattcatgtagtagcccttttcaaccttcgtcacgtttttgaccttattaaggcggttgatatccttatcagctaagttaccttgttcaccggcttcaatctgtttgcgcgtgaggtttcttgcaatctgaatcgtatttggattaacttgcgatgaaatctgatcattaatatagccagtcaccccttgacccaagcctagcattaaaatgacggagaaaatcccaatggacgcgccaaaaataatgagcaaattccgtttaatatcgtagcgcatgtgttgcattgccattttgaaagcagacataaaacttaatggactactcttcttaattaccggaccagttggagctgggtaagctggttttaattgcttgtcataatcaatctgcccatcaaccatgtggacaacccgtgttccgtggtcagcaacggcttgtgaatgggttacggcgatgacgagtttgccatcttcggcaatcttttgtaagatttcgagaatctcggccgtattctggctatctaacgcacccgttggttcatcggcaatgatgacatctggatcagcagccaaggctctggcaatagcaacccgttgcttttgtccacctgacaattggttgggatgtttatggatatgttccttcaagccaacttgttccaataaggcggtcgctttggcaacccgttccttatgtgatagatcagtcatttcaagtggcaccatcacattttccaagttagtcaaatgactaattaaattaaagctctggaaaataaagccaatcgtttgactccgataagcatcaaatttcttttcggatgcattctttaaagatgtcccatcaacgatgagctccccatcgtattggtgatctaacccaccgatgatgttcagcaacgtcgatttaccgccgcctgattccccgaggattgaaacaaattcgccacggtcaaagcttaaattgatgccttttaagactttaaattcagccttgttcatataataggacttgtgaatatctttaatctctaataatgtcaatgtcgtacgctcccactacttagattgctcgtaagtgtcacgagtttttagtcgatagataataaatatactttatcagagcgcctttaaacaaacaatcggccttaggtctgataacgaaaagagtgtgatgtaagtcgggtatccgccgaggattaaatttcagagaataaaaaagaggttgcaacaaaatttcttctgttgcaacctcttttgcatgaatctttaagcgagtgacgggaatcggacccgcgacgcaagcttgggaagcttgagttttaccactaaactacactcgcattacttgatatagtatagcatattatttccgatttgtgcatattttttgaaaaaaaaaggtttaaacgcttaacaaatagcgtatgtatgcggtatactattgataacaacttgattggagtccttttaatggccgattcgcaaaatacaattcctgaatcaaccgcatttcattgccctgcatgtcaggcgccaattgaatatggtatcaaacgttgcccaggctgtcagactgcgatcttctatcgcgatatgtctgaaacattctggaacgatcgtaaattaaatctttttaaacaaacggatgccattcaacggggcaattgacttaaattaactattcaaccgtcactttttgtgacggtttttttaattgttaataattaattcagaaggcgttaccattgttaatttgatagacttcacgactcattttagccgtatttttaatttgaaaccaacggtgatggttgctataatggcacaccatacacaggaggtctttatgatagagaagaacaaaatgagtttatttagcctagtgatgctcggtttaagttccatcatcggttccggttggctgtttggtgcatgggaggcaacgaccgtggcaggcccagcagccatcatctcttggattgttggcgcaattgtgattggtgcaattgcctttaattacgttgaactcgggacgatgtttcctgaaagtggcgggatgagtcactatgcccaatatagtcacggttcattactcggcttcatcgcagcgtgggccaattgggtatcattagtcacgattatcccaatcgaagccgtcgctgctgtccagtatatgagttcttggccatgggcgtgggctaactggacgaatcactttatgcaccacgctgaaatttcgaatcgtggcttgctcgtcgtctttgcctttatcatcgtcttcacccttttaaatttctggtccgttaaattcttgacccgttttaccagcttcattgcaatctttaaattaggtgtgccattattaaccattattatgttagtctcaactggtttccatactggcaacttcgggcattcaatggcgacgtttatgccctatggttccgccaaaatttttgcagccacttcgatttctgggattatcttttcatacaatgcctttcaaacagtaatcaatgtcggcagtgaaatccgtgattctaaacggaatattggacgtggaattgcaatttcacttgggatcagtattgtgatttatctactcttgcaaattacctttatcggttctgtttcacccgccttgctcgccaaagtcggttggcacggtttaaacttccaatcaccctttgccgacttagccattttacttggaatccattggttagccgtcttactttacttagatgcgtttgtttcaccctttggaaccggcgtttcctttgtcgcttcatgtgcacggacattagcagcattaaagcagaacaaacacatgccaccgattgtcggccgcatgaacgaacaatataatattcctcgcattgcgatggtcattaacgccatcgtcagcatgctactcgtttcaatttttagaagttggggaacgttagccagcgtgatttcaaccgcaacgttgattgcctatttaaccggcccggtcaccgtcatgtcattacgtaaaatggcccctgatatgaaccgccctgttcagtcaccttggatgaaaatcatgtcgccattatcctttatccttgccagtttagcaacttactgggcaatgtggccaacaaccattaaggtgattggcgtcattatgcttggcttaccattttatttctactatgagtatcggattcactgggaaaatacttgggcccaattcaaaggaagcttatggttaattatctatctcgcattgctttcgctgatttcattcttgggcagtcgggaattcaacggaattaacctgattccttacccactcgatttcgtcttaattagcgcattagccctcatcttttactattggggaattatcagtcgcttctattcgaaatacttctcacgcgcaacacgaattaacgatgatgtgcaactttaagcatgactaaaaaggacgccaaacaacggttaaagttgtttggcgtccttttggtatctctagattgtttctgctaaaatgaatcgtaaagtacgttatctttttcgggaggcgctaaccaatgcaaaaattgaccgttcaatctactgatcgaatccatactttaaatgtcgtgacttggtttccaatccaaaaaccggtcgcagttgtccaaattctaactgggatggccgaatatatcgaacgttatgatgctttcgctcaattcttagcagatcgtgggattatcgtcatcggacacgatcatattgggcaaggccactccgttcagtccaacgatgagctcggttatttcgggccaaacgggctccagacgctagtcaacgattgtaccttaatcggtcgcattgtccacgaggaatacccagagctaccattatttgtgctcggacactcaatgggctcaatgctagcgacacaatatgttaagcaaactgaagtgccgattacttgagccatcttcatgggcgttatcgatgtacccttcattcttaaatccgccttaccaatcgttaaattaatcggcgccattgcagctaagcgccccggtactgtctggaataacttggcgtttggggtctatcctaaacgatttgatgctcaccgacctttttcatggttaagttacaatcaagcaaacgtggcggcctacgaacagcatccattgtgtggctacgtcttttcaaatagcggttttgcaatgctcttcaccctcactgagttaactcggcatgctgattggcaacttgccttacaatcccgcccagttctcgtaatgagtggcgccgacgatccagctggcggttatggtcgccgcgcgcggcatttaacgaaccaattcaaaaagcgcaccgttaacaacgcaacggtgcgcattctacctcatacagcgcatgaaattttattagaaacagatgctacccagcattaccaattcatctacgattggttgactaaagtaatttctggatctcctttaacacaccatagttctcattagtgtcggcacgataagtcgcatattggatcatatcgtcggcagcattccccatcaaataactatgttcaacggtttgcagcatttctttatcattataagtatccccgaaggccatcatttgcgccggcgtgatgttgaaataatccgccaaaaagcgcattgcatggcctttgtcgatgccttgattcataatatcgatccattcaacaccagcaaccgttactgaataagccggttcaaattcgggtgcgaaaacagcttcatactgtgcttgactatctttttccgggaaataaatcgtaaacttgttggcttcaacactaacctgcgttaaatcaggtacatattcaatgttggcatagaattgccgcaaagtcgcgtcataatctcgatattgtgtttcaacgtacgccgcgtccatcccacaaatcacgccaatcccatctggcgtttgattaacgaattggaccatccgttggtaatcagctaacggcaataaacttttgaataaagtttcaccttgataaccaattgcacccccgttatcgctgacgtaaaccattgtgtcagcaagttcgggaaacatttgctttaacgtgtacattggtcgaccgctggcagctgcgaattgaacccctttagcatgtaattgctgaatggttggtataaagtttggtggcaactggccactctcagttaataaggtatgatccatatcggatgcgattaatttaattgtcatgcttagttctctcctatcccttagataccttaataatataccgtttatgccaattcatcgcaaccggttacattcaaaaataatcatactcgacatccatcgcttcgatcctgcccattaacacgcgctaaactaaataactcccccgttcagattccgatagtctctctaaaagatttgaatctcattgatattgaatgttcttttaaccgcgtcggacattagcgcaatttggttatcaatttcatcccaattggtagtaacaaatccagaatccaaactatcaatcatgtcattactgtttagtctaatctttaataataactgtttccccttggttgtaagtcgatagtatactttacgactatcaccaataaaactccccacattagcccgttcaattaatcctttttcacccaacgattggcattggcgggaaatagctggtcgagaaacgcccatacaagcagcaaggttgccgggcgtttcttctttttcacgatccattttttccatcaacaaatattgttcgagtgataagtcaacattttgcaaaactgtgacaaataattgatccaaaatattacgatatttaatgagcattaataattgattattcataataagcattactccttctatctattttgaggacctacaatatgcgaactagtaatcctgctctgctccacaggcattatatgtggctggtgaattagccctagttttcagctgaatccacgataactttgtaatcaatcttcaccgcagtcttattctttttggcggtcactgaaattggtccacctaagacagcgagtagattctccaaatttgccatgaccacaccagtgtctacggcaaccgcaatcgtctcggcagtcttctctttgaccagagccaatccgaggttgccctttacgaacgagaatcggcgttcaatttcgccacgccggttctctgcgtcttgatcttgccggcgctgcgctggatccacatgctttggcttacgtccaagccgcggtccactgacacggataccgaggttggcacacatgccaatgttttcgcgagttcgatacagtgtgtccaacagcacctcgtctggatattcaccatgcacatcgtaatagtgatcaagtgtcgaaccaagatcgctactttcgttgaaggcattgaacgaaaaccgctcaatatcaatcacgccatccatgatcgaaacatcgatcttcggtccaaattcaactggagactttgatttgccccgcatgatcgggcgaatttccggctgactcaagcttacgatccggttttcaacgcgatgcgtgtggttgcgatacatgtaatcttgttggtcaaagactaagcgaatgacgccaagtcgctttgcccgcgcagcagttaaagtcgctcctttgtcgatcatcgcatccacgtaccgcaagtcgcgacgaatgtattggagctgggctttgatctgcttttgcgtcaattttccccagcgtcgcggtttgcgagaaaaggcagtccactttgcgtgagcttcacgcttgtaagtccgtggcggtgcgatttgaagctgtttagccataactttaatgtcatcttctaggtttgttctcgcctgattaagcagatgcgtatcttgggggaatttaatgtttactggtgtgcacgtggcgtcagtgatcatcaccgacttggttggtaagtggcgttgaagtcgttcgcgaaccgcatcggtgatgatattgcggatcaattctgaaatcggcgcgatccgccgacgaaagtacgccagtgccgtgtgatcaaacgggactttgagttgatactgcggaatgccaatgaagtattgataggccggagtgtcacgaatggcttcgacaacatctcgatcagataaaccagtccgttgcttgatcaactgggccccatataacaacctgaacggtttgccggcacggccaagtttcgacgggaaggctaattggtatgcctcactcaatttctgccaaggcatttgatccgcaagctgaacccattcgttgtctgcactaagtggtgtgctcaaagcggtgccaaaggactcaattgacagttgcgtgactgtttgacgataaaccatggataacgcctccgatagggttgtgataactgcatgggaaatcacggatatgccggaaaacctatgcatctattgtacaacgataacgggttaacggactgttacaaataacttggacaaattattcaccagccactaactatgtttacaagaactggtttagtcggctcatggacgaagtccatcagttggcgacctgaactgaataactgaataggtcgtgcgtcgagccgaaaactgggtcggtctgttcgtggtgcatcgatcaccaacttctccgctcagtcagtattcgcaacgctccaaacgttgctttcagaccggccagatgcgatttcatgtcccaaataccgaggtgaataatccaggttaaagtctttgccttcagagaaggcattaaagtctaagcgttcgatatcgattacgccttcgcttagagaacaatcaatcttcgcgccgaattctactttggcatttgctttgccacgctgaatcgggcggatgtatggctgttggagactgacaatacgattttcgacgcgatgcgtcttatgggtatacatgtaccactgttggtcaaacaagatccgaatgactcccaggcggattgcctgcttttctggcaaagttgccccaaggtctaagaactcgttgatgtagcgcagatcgcgacgaacgtattgcaattgtgctttgacctgcttatgaaagccgccgcgttgttgctttggatggcgcgaaaacgccgtccaacagtgtttggcttcacgtttatacatgcgtgggttcggcacacccaattggtgtgccatatcgattgccatcgcttcaagattgagccgagcctgattgagcaacacagtatcttgcggatacttgattttaacgggtaccgctgttgcatcagtgatgactgtgtctaccttgaacgggaccaacgcttcaatcttagcccggacagtgtcgttgacgatattggtaatcagctcagaaatgtcggcaatccgcttgcgaaagtgagccaagctggagtagctgaatggcgccactgctttgtactcagacaaaccaatgaagtattgaagcgccggtgtatcccgaatcgccgcaactacaccacgatctgttagccccattcgttgttgaatcaaaccagcaccataaagcatgcgaaaaggcttcgcagcgcggccaagattcttggtaaactccaattggtatgcgtcatcgagcgccttccatggcataacctccgccaattgaacccattcgttatctgggctaagaggtgtgcttagaccagcgccaaaagattcaaatgatagttgaagcgggctgtgacgatatgccatgagataacctccaaggatattctggaaaaatgcacgagaaatgtgcgaaatcggtaattttctatggatttattataacgcaataatgagcttatgggttgaaatgcttgaacgttatagtttttaaacggccactatgctattaattgcaccgatgtgacagcgtgagttaattttaactcggtctccaatggatatctgaggcgtatactgaaaatctttgaacgagtcccacgcctctattcgacaccctggtcctccataaaactgatcaccaatagaaatatactccccgcctcttatacttaggctctctgtaactctagcttgcttcccaatccgcacaactttttttaattcatcttctgaaagcaaatgcaacaattttgaacgtaaatgtcggactattttagcaataattctcattgatatgcactccaactgtattaattaatgagttcccttacaaagttaataacctccgagaattggctattgcccttgtaataatcggtattggtctcaatttcgaatttcatcgtttgactacgtttaactgcggtgttaattcccatagccaaatcatcaaaagtggcacgattgacggaaataatgtttgagctgaatgtgcttaagtctttgcagatgaaggaatttgttacggtttgaacgccagcagtagccatttctaatggcggataactagggtgaggagaactcatcaatgacagacccacacgactagtcactaataattgagcgtaatcttctaatgttagctttcccaatgaagttaatttgaagccatcagccaactcaatatctcgatgttttgacccgattgaaataaaattccaagatcgatctggacgatatctcgtgatatatgtgtttagggaattcacagcgagtgcaaaacaatttctgtcttcaaacggacgcccatacatgagaacgttattcactttcggttcttgatgttttagcgcttgctgttgcatagtatctttcattacagaatttaacactggttcaaaatagactttggaatcgaaatcgtaaccgttcaattcaaaatatttgtaaagttgagatgagttgaatatcgccacagtatctttagctttataagtcgaatcaactagcatactctctgatgaccaattaaaaaatcctggctcatagtcttgaatcaaatagaaagttttttgagactttgaaaaaaaatcttcttggcttttagtcaaattttctattacgtacttggttcgccaagacgtggccaagaaaatatcattagcccgaattggtaacatattatgagcacgccaagcaggatcagcagcacatactgtggtgctcgaatcgatgacatcctcctcagccttaatgaacttataatttggatattctcgtatcagatctttatccacaggaatgtcagtaattataattcttgtctccatatgtaacgtgtttgcaagggtattgaaaagtttaagtgccgtgctaataccgccaaagacgtagcggtggtgcaatttagggagtagtaaattcagtcttggtgtgtcagaagactcattcgatttcttaaacttaattaaattcaagtaatcaaaatcaatattgtcatacttattgaactttttttcggctattctaactaatttgttcattttgcgtcctctctcgcgtcaaaatatgctgactcgtccatgcttcacagatgaatcccaagaatataaagtaaataaatgctgttggaaaaaacctaaagagttcaaagaagaacatagaaatgctcattgttacaaatgcagcagcaatactttgaacctgaacatctttagtacgaaaaatcatcagaaatgaaatcaagatcatcaagcaaacaaccaataacacgattatcccttgatcataaaaagtggtaagaaattgattatccgtttcactaaaatcactcattgttatgctaacagagtccatcaataccgaggctgcatccagtccgtggccgatcaatagtgagccaaatgaagtagatggaataacctgatgaagaaaatatgtaatggtcccagtccgctgtaacgcagacgaatcagatgaaagattattgaaccggagaaaaattgtatcaaaaaccccagtctttgatagaacaagcacaataaaaggtaggcttaataaacatatgagtatgacaaacaatgtcttcgaatttacttgccgaattttgaacaggtaccaacctccccaaaatagtaagactatggctaatgcaatccaagctgaacgtgactttgttagaaggagattgatcatcaacagtaccatcagaaacatatttgtcttagtatgttgaaaaaagccaaacattagtatgatcgaaaccgcaactaaaacagaataaataataggatggatataaaacgttgcaattctataattacttgggctgaattgccaataataacgatttgcaagcccattactgacgcaatagttatatgcaattctattgaatttgataatggcttcataaattccatacaagccgcacacgcctgcaataaatatagtcattgtcttaataaacttaactagtgtatctcgacaatggaacaaaataatgcctgcaaaaacgcacgcaaattgaaacgtgactcgaagaaataaggatagggcatcctggtaatgtgtacccaagtatacagccacaagctcgaaaatatacactccgaatattgtcagtaatagcgttaaatttgatctacgtagtgcatttgaattattcagaataaacacaactaagaaacctatgaaaattgtgtatgtaatccgtccttggttaccacggataaagttcagcaacacaacaaaaaataatattcccagtattgtgactggatttttcaacctgagtttgctcatcataacttggcgaatcctaatcctttcatgattgatgtcgaatatacattattctgagtaatggtccaaaaagtgaaacacgacaaaaggcaacaattagcacgtccttccatgattgagtaacaacccgtcccctaaaaatatcattattaacaatgaacttgctgaggagcttcttctgctctccaaatttaagatccgttcctgttcccatcagaatgttatcgatataaacttttagatagggtagttttctttgatctattaattggcttgcctcttgaccaaaaaaattttcaagcatctttttttcatgactcagtgataactcaaccgatacacatctattgtaattaaactttcgtgatgtactatttccaggtctagaataatgaaaataatacacacttggattgacacaaattttgatattcggtgacgcttcaagacagtcaaacatgaaattacggtcttcttctccggccttcatttccgtgctgaagtgaacatgatttttctccaagaaatctttccgaaaaagtccatcccacacatacaaaaagatgggcccatcactcaacgctacgaaattttcgaaaagattatctcgcgtaatcacgataggttgcgaggttgtaaacttagtatcaacggaggtcttttcggaaataaaccttcttccaaatttaacgatatctacatcttttgacttcgccaatttaagattgtctgcaatcagatctttttttaataaatcatcattgtcacaaaatgcaatccattttccttcggctaatttgatgccagtatttcgagcttgactaattccagaatttttctgagaaacccatttaactctattgtcttcgagttgagctctcttgcaaatttctgcgctattatctgtagatccatcgtcgataagaattacttcaatattcttgaacgtctgtgacaggatactttcgatggttttttgtaggtagttttgtgcattgtaaacgggaacaatgatgctgacttcaggattcacacttatcacctctcatatactgaagggttcggaagaatctgatcaaatgccgatattagatcacgttttcgattctcaaaatcaaccgattcctcaggatcatttaagcaaatcatcttctgtttctgcttagtaatgccttcagtgatttctacaatattatcgtcttcaacctcgtatctaagtcccatagcagcatgaggactaaacttgccagttgcaatttgccagtatctgaaaatgtactggttaacgtcataataacttctgaatcgatgatgccgagttgcatctagcggtttaaactctttactccatacttcatccagcgttgacttaagcattgcaactgggaggtgtgcatttttgaaacctgtaaactccttccaaggaagtaaaaaaagatttcgaacgttctgagcgccgtaatgaggattaaaccattttccaaaatttttcttcatttgtgtatacttgtcaaaattccggttgatgatatctatgtcattcaacatttgatgacagtaagcactttggtcccccaccgacgcaatcgtcccttgcaatccttccaactttggaagtccctgtgcatcaaagaaatcctcttggtcgactgagttcaataaaaacatgtcatcattgaagtaaatgaaatgttctgctagattcgggatttgattcatattaacttcaatggcgcaggaattgaacagtggcagacaatcttcaggaataaaatcttcatgtcttactacgtgtagctttggcgcatccaaatttaagaagttcggcagatgtccatatgttacaaaatgaatttttctgacccatggtgcaaagttttcaatcgcacgaaaccagtatctcattagatcccaatcacgaaatcgattggtcgaattattgactttatccttatcactctgatattttgctttttcagcaacccatttgggatcgtttccatccacccaaagaatcacaacatcaatatccactctcttatcctctttaattaatattatttgttttcagtatcacgtaaatataaatcataaaacctttcattcttcattttttttgcatacgttgtatgtcgaatacacgattcaacatttatcaatgggatccttgcagccatacgtttaattgaagacgaaataatttttttgcgtgagtctttatcatccttccaactgccctcgcaccgatgcaaagcatgcttctttcctatgattggtccaatttcgaattcttctttggaatatacactaaaatcattgaggtgttgggttttgccattcaatttaaaatcagaatactctgtcttaagataataggtgagtaaatcgttattgcatgtgaaattgatgtttccgaatctttttacataaaagtttttataatcatcatcccagtatgcttcttcgtataagtcaatcaaatctccaagaattcgatgatgcttgactgaacccatgacggccgtaccaatactggaatcaaaaatatagcccacaaaaaatttttccgttaaaagagtatcaaagtttctcgttaattcaacgtctgtatcaaggtagatacccccctcattgtataacgctactaaccgaaagtagtcgctaacgaatgcccactttttttgttctacagcctgccttacaaatttgtttgcagaaaaatcacaatttgtttcgttccattctttgataaggtaatcagtctttaatggccaagtggccatgcattcttttacattttgacttttttcttgtgaaccaaaccaacaataatgaattttccttggaatcataagttagcctccatctccaattttcttaaatactgattgataaattcaatcgcagtactttgatgtgatacatatggatctaactctacattcatcacggtttgtattgcctgggacaacccagagatttcagtacacatcacaacctgattattgcttgaaaatgcctgagctatttctagctgatggtcatcaacgtgttcaccaaatttactcaatctcggaaccactaaaacaggcttattttttttctttgctgtaattatactacctacaccgctgtgcgtaattacaacactagaacaatcaatcaactgttcaaattcttcctgattcacaaagcgcttaaactgataatgttgtggttcgtaatcagaatgaccaatttgtgcaaaaacttcttcacgtaacgatccgttttctactaacacgtcaagctctttgagtaacctgttgaactgaaacttttgtgtccccaaaatcacaaagatcataaaaaaacctcactaaaaaattgcgccaataaactttgctttcggatagtattttaataatgattcccattgtactaaaaatacatccgcaaaatgatatagtattcttccagttaacgacggccgctctgtacgtgcaaaagattcaatatagattacctttttcctaaacaattttgccatgatgcatattggaacggttgccaaggcacctgttgatattaccatttgaggttgttcttttctgaaaatcttaaattcgttaaagatcagcttcatgaaatggatgaagaaaaatttttcattccggtttatctgcttgacataatacgttgtatctgtcaggttttggtcaaggtcatcgcttttttctgtgacaataaagtgattcgtcgtatccatgatttttttcaaacacatcaactctgtgagatgtccaccggaagaagcacaaaaacagattttcacgattaatcaatcctccaattgagtcatatatagttaattaagttgatgatttgaaaccaaactaacacatgtactgagcattctgaatctcaacatagcttgattagtatatttgagatgtatcgtctgtcaacaactatttttaattaattattacttagaagttataactccttaagcaacatataatatgttatcatgttttcaattaaataacaagtgtttttcaaaactttttatttaattgacgatactgcttatcactaatcagctcgcttttgacaactttattagtataccaacttgcaacccgtgatgcaaggattttctgtaaataaataataattatcttataacaataaaaaaaggcccttagctatactaggggccttcgtttttctactattaaacgtagaggtttttaacttgtttttgtaattccggatgtgctaagaactcatcatagttcgtttcagcacgttcgacaacaccgttcgctgatacttcaatgatatgatctgcaattgtttgaataaactgatgatcatgcgatgtaaagactaaagcacccttgaaatcgatcaaagcatcattcaatgaagtaattgattccaagtccaaatggttggttggatcatctaatagtaaagtattcgatttttgcaacataatcttcgatagaatacaacgcactttttcgccaccagaaaggacattgatttcttttgtgacttcatctccagagaaaagcatcttgcctaagaaaccacgtaagaaagtattgtcatcttcacccttagcggcaaattgacgtaaccagtctaagatgatgagttgatcatcattgaaggctgagttcgtatctcttggtaagtatgattgttgacttgtcacaccccaggtaactgtcccagtatctggctgcacttcacctgctaagatttgcattaagacagctgtcgcaacgtcatttcgtgaaacgattgctgctttttcgtctggcttaactgaaaagctgatgttatctaacactttaacaccgtcgattgtttttgaaacattctcaacccgtaaaagatcattccccaattcacgttcgaaatcgaacttaatgaatgggtattgacgtgaagagggttggatatcttctaatgtaatcttttctaattgtttcttacgagaagtggcttgttttgattttgaagcattggcactaaaacgcgcgataaaatcttgtaattctttgatttgttcttcttttttagcgttaacgtttgattgtaacttagcggctaacttacttgattctaaccagaagtcgtagttcccaacgaatgtcttgatgcgaccgaagtccacatcacacatcattgtacagacttggtttaagaagtaacggtcatgggaaacaacaatcacgatgttcgggaagtctgctaagaaatcttctaaccattcaactgaggcactgtccaacccattcgttggttcatctaataataggatatcaggtttgccaaagagcgcttgaccaagtaaaaccttaatcttttgcccttccatcaattcactcatcttcacatggtgtaaagattcatcaatccctaaggcttgaagtaattgagcagcttctgattcagcatcccaaccattcatttcagcgaattcagcttctaaatcagcagctttcatcccatcttcttcagtgaaatcagctttagcatatagggcatccttagcttgcatcacttcatacaacttcttatgaccttgaatcacagtctctaacacttcaaattcttcaaaagcgtagtgatcttggttcaaactcgacatccgttcattagggcccattgagatatggcctgatgatggttgtaatttaccttctaataattttagaaaagttgacttacctgcaccattggcaccgatcacgccataacaattcccaggtgtaaacttcaaattaacgtcttcatataacttacgcccagaaagcgttaagctcatttcactaacagttatcacttgattccctcacttttctttcatgactctaaaaagccaaccgtttcatgtgaaacggctggctttctaccattgacaatatatgcttaactctaacatatctaatgactagttatcaaccaggctatttgaccttagcaatcttaccttgttgaatatagacacttagaatcccgatatcggctgggttgaccccaccaatccgactggcttgcgcaagtgtttcgggttgaattttttgtaatttttgacgaccttctgttgcaaggccttcaattgcatcgtaatcgatattggctggaatctttttagcttccattcgttttaacttcgcaattttagctttttccttatcgatgtaacccgcgtatttgatttgaatttcaacttgttccacaacgcggttatcaatgccttcgactgctggaataaattggattaaatcagcatactttacttctggccgttttaagaagtcgctggctaaaacaccatctttaagtggtgcctcacccttagccgctaaaaaggcttggatttctggggttggtttcaagcgaatggttgctaaacgtgctaattcagcttcaacggctgcttttttcacttcatagctgtcaaagcgatcatcattgattaagcctaatgcatgacccttttctgttaagcgtaaatccgcattatcgtgacgaagcatcaaacggtattccgcacgtgaggttaatagccgataaggttccttcgtcccctttgtgaccaagtcatcgattaagaccccgatgtaagcttcactgcggtccaagatgaatgggtcgcggcccgtttgcttcagagcagcgttgatgccggccatcaagccttgaccagccgcttcttcatatcctgaagtgccgttcatttgaccggctgtataaagattttcaaccactttggtttcaagggttggttttagttgccatggttcaacgacatcatattcaatcgcataaccaggacgcatcatttgggcattttctaagccttcaatcgaatgaatcattttgtgttggatttcttctggcattgaggttgagaaatcaccgacgtaatattcttctgtttcgcggccttctggttccaagaaaatttggtgccgaggcttatccgcgaagcggacgattttatcttcaattgaagggcaataacgtggacccaccccttcaattacgccggtaaacattggggcgcggtcgagattgtcgcgaatcacttgatgcgtcgtatcattcgtgtatgtcatccaacaagaaagttggtctttcaaataagcactatcaggtgtttcgaaactaaagtggtttggttccttatcccctggttgttcttccgtctttgaaaagtcgatcgtggtgccgtccacgcgtggtggggtccccgttttaaaacgcgtgaggacaaatccgttgtcttccaaactttcagaaagtttaatagaaggaattgaattattcggaccagatgaataggttaattcgccgataataatcttaccccgagaagctgtcccagccgttaagatcacactatcagcgctgtaacgggcaccagtgttagtgacaatccctttgcagacaccgtcttcaacgatcaatgattcagcaatcccttgacgaagtgttaagtgctccgtcgtttcgatagtccgtttcattgtccggtgataagcgtgcttgtcagcttgggcgcgtaacgcgcggacagctggccctttacctgtattcaacatccgcatttgaatgtatgttttatcaatattgcggcccatttgaccacccaaggcgtcaatttcacggacgacaatccctttagcaggaccacccaatgatgggttacatggcataaaagccaccatgtctaagttaatcgttaatagtaatgtttcgcggcccattcgtgcagcagctaaagccgcttcagaacctgcatggccggcaccaacaacaatcacgtcgtagtgcgctgcgtcatattctcgcatattttgttctcctttaatatggttcaagacctatttacctaaacagaattggctaaagagttccgtaatcaattcatctggtgctgaatccccggtaatctcaccgagcttatcccaacagttggtcatatcaatttgcacaaggtcaactggcatcccagctgcaattccactgatgacttcatctaatgattgttgtgcttggtttaatagaccaatttggcgggcattagtaatcatgaccgtactttgactattttcaatcccaccgaagaagagtttggcgatttgggcttccaaatcggtcaccccttcgcttgttaaaatagaagtttgaattacttcatccgcattcaccaatgtttggagttcatttaagtctaacaagttcggtaaatcggttttatttaaaataatgatccgtttcttatcagtggtggccgtgattaactcgcgatcttcaaccgttagtggttcactttgatttaaaactaataaaatcaggtcagccttggtaattgctgcgcgacttctttcgaccccaatcttttctaccttatcttcggtatcatgaattcctgccgtatcaacaagcttcagcggtaccccacggacgttgacatattcttccaaaacatcacgcgtcgtcccggcaacatccgtcacaatcgccttatcttcatgtaataggtgattcaacaaacttgatttaccaacattgggccgtccgacaatggccgttgctaggccttcacgtaagacttttccttgttgtgccgtttgaagtagttcaccaatccgcgctttcacaagttcggctttttcaagtagaatccgcgtcgtcatttcatcggtatcatattcgggatagtcaatgttgacttcaacttgcgccaatacttctaagatttcttggcgtaaattcttaatcaggtgcgttaaactcccatctaattgatcaacagcaacttgcatcgcccgatcagtcttagcccgaatcagatccatcacagattcagcttgggttaaatcaatccgcccatttaaaaaggctcgtttcgtgaattcacccggttcggccattcgtgcaccatagctcattaataattgtaagatgcggttcgttgcgacaattccgccatgacaattaatctcaatcacatcttcgcgggtaaacgttttgggtgcgcgcatgacagacaccatgacttcatcgactactgcgtcggttttaggatcgataatgtgcccataattaatggtatggctcgccacttgatcaagatctttgccgcgataaacgcgtttaataatggctaaactctcatcccctgaaagacgcacaattgaaattgccccctcaccaggtggtgttgaaatcgccgtaatcgtatcaaattctgtgactgtcgttggcattttaaatgcttcctttccgaaatagctgcataaaaaaagcgcttagcgtccacccctcccgtcattgcgtaaggggtggacaaagcactttcactactttatcgatatttaattagtttcattatacacgatttttttagagcgtcaattcacaacacctaaaatgtgcgcgctaattccaccacaattgaccggcgatcgccttggccttctgaatgagtttgaacatggtgattagttgctaaatgcccatgcacaattttgcgttcaaaagccggcattggttctaaaaagactggtttgccggtcgcaacgacttcacgggctgctttatcggcaaggtggctgacaatcgctgctcttcgctgccgataatcaccaacttctaggataatggtttgcttgcccttcatatgatgatcaaagtaagtctgcgctaaatattggagcgcattaattgtcttaccatgcttaccaatcaacaagccttctttatcggtcttcaaatgataagtcgtactccgatggtcgtgagttacatgaatgctgaccggtgtgccaatttgagccgtgatggcttccaaataggcgcttaactcagcttccgtttccacaccacttttccgcttttgcggcgtactagttaaattgtctgttggcgttggttcaactagctcttgaactggggctggggcgctttgtttaacttggcttggttgttcatttggcgttagccggacaactgctaagcggcgaccaaaaccgagaaacccttttttgccggcttccaatacatcaacggacacttcctcacgcgttagatgcatagcttgcaacccttcatttaccgctgcttgaatatcgctaccttcatatgttggcatttcaaaacctccgatcaatttggtcactccaactagtgtgagcgcccgattctcgtttattataccatgatataccactttaaaaatagcatgtcattatctgagatagtccgccgtcaaagctaggaattgttgtacatctttagcgatgctatccgcggcagcttgccagaaatccggttgggttaaatcaaccccaagatgtttttgcgctaatgcttcagtcgacatattggccgtatcacgtaatagtgcgatatagtccgcttcaaaatcaggcattgtctgtgccttggcataaatccccatcgaaaaaagatagccaaacgtataagggaagttataaaacggcacgtcatcgaagaagaaatgctgtttgtccgcccagaatagcggatcataatcagtcaacgcatccgcataggcttctttttgagcggctagcatgagtgcttttaaatcagctgttgtttgcaggccattttggcgcgctgtataaaaatgtcgctcgaataaaaaccgtgcgtgaatattcataaacatatcaattgcgttagtaattttctgatccaataaattaatcttcgctgctgggctttgcgctgctttaacagtcgcatcactgacgattagttcagcaaaagtggaagctgtttccgcgacgttcatcgcatagtcttgtcgccaacttggtaaatcattaatcatcattgtatggaacccatgccctaattcatgtgccaaagttgcaacaccattgggggtgccatcaaatgtcataaaaatccgaaaatcatccgtttcaggtaaatcagtcatataaccacctggttgtttgcctggccgatcttcagcttcaatccaacgcttttcaaacgcggtttgtgccaccgaagccatcttgggactgaacgctttaaagttctgcatgataaaaaccgctgcttcatcataagaataacgctgcggttgaaaatcacctacaaccactggtgcccaggtatcataccaagcaagctgttctttgcccattaacgctgccttccgatttagaaaatcgacaagcggcgctttattttgactaacgatcgaccacatcgcttctaacgttgcgggttgcatgcgactcgttaccaatggctttttcaaaaagtccgttgtgccatgtgcttgataatccgttaggcggaagccagccaaatgatttaacgtatccgttaataatggtgaataccgatcccaagtctggtaccaattttgaaagacgcgttggcgtaccttgggatctgggtcagattcaaatttattctgcgcttgtcccgccgataaagtcgtctcaccatcggggacttgaatttcagcaaccaatgagtcgtaatgatcactccatccagttaaaccatctaacgcgaactggttaattagtttttccgtcgcttcatccaaaagttcagcaccattcgtccgtttttcggttagattaaactgaatcgcttgtaaggcaggtgtcgatacaacggttttaaaatctgcgtctgacattgcgaccaatttttttgtgagtgcgacatcaatctgattcgcatcattttcaagcgcattaatccgccccatcatcggtgcaacttgcggattacgttcatccgttgattgaatcatattcacgaaactccccgtttgcttgagacccgcttcaatcgcttgtaactgttcagtgatttgcgttagcgttgcaaatgttggctgatctgtcgcaaacgtccagttctggaccgcttctaataagggcgtcatttgtgcagtcaaatccgccaatcgttgcgtcaacgctggtgaatcaatccccccggcaaaaatcggttctaaatcccattgttctgaataggtcatctctttgtcctccacttttaaacgattgcacttattatagcgaaatttcgcgcaaagcgcgattaattcaaccagatccactagacattttgataatatctgttaaattaggaatgtaagcagatacatatctgctagaaaggcgatgtttatgatgacgattgaacaagtacccgctaatacaatcgcagatttaaaagcactgttaaaaacgacccaagtgcccgataaaattatggcaatgggacccgaactgatccaatacttaacccatattaaggcgagttaattatcagacaccgaccatcttgggttcgatttagggagtgccggcattttaacgttaatcgaacaagtcaatacagcctttttcgatcacttccatatgttcgacgatgctgcaccgattgaaccaaagttaacgcgtaaaattctagtgctttatcatctaaaaccgattgatgatcagcacttcctccttcatttgaaacaattagactattaaacagcaaaaaatcgtaaccaaatcggttacgatttttttattctatcactgttttaaccgtatatattcattaaccgaatgacaaattgactgtaaactaaaagtccgctgatacgtttaaacgcgtatcggcggacttttttgcaaggtgttaagcgttctttaaagcaacctgagctaacaataggccaccggcaatgccagaattgttacccagtccagcgggaacgatatagtcatccagtggtgggacttcttcgtagccatttagataggcggcaaacttttcacgaatcatgggaaagagctgccgttgattcataacaccaccgttaagaataattttatcaggtgcgaaggcgacggtgaggttgacacatgcctgtgcgatgtagtcagcgatgattggccagaccggatcgtcaacgggaatatctttcccagctttccccgttcgttttccaactgctggcccagcagctaaaccttctaaacagatgtcatggtaaggacagttggacttgaaatcgtccccaggtaaccggttgagtcgcatgtgaccaagctcagtatgagtgcgaccattaaaaatgtggttctgactaatgacgccagcgccaacaccggtaccaatcgtcatgtagatgctgttagggacgtccttagcgattccaatcattgattcgccataagcggcttcgttaacatcagtggtccagtagagtgggatgttgaatcgacttttaagatggcctaaaaagtcgaagtcaccccagccgggtttgggagtcgtggtaatgtaaccatatttcggatcatcgggattaacgccgatggggccaaatgaaccgataccaatcgcgtcaacgggatgagtcgtaaaatagtcgtctaccgcagtcatggtttcaatgggggttgtcgtggggatcgaaattcggtcgctaacttgcccgttttcagcgcccgtggcacaaacaaattttgtaccaccagcttcaattgcacctaaaagcatagtgtgcctcctgtagttaaaaatgtagtcttatttattctcctaataaagtttagacagttgtagcagcaactgagctagctgccggttcagtcaacgcaacgagcggttcaccagcttggacattcgtgactttgagtcgttcaacattagcgtaattggccgtatttgtgacgactagcatgacggttggatcatagttagcagcttttaaggcagcgacgtcaaacgttccgagtagatcaccttgatgaacggtatcgcccttctgaacgttagtagtgaagtgttcaccatttaaattgaccgtatctaatcctaagtgaatcagaatttcggcaccagcagttgttttgatgccataagcatgatggctatcataagtgacagtgatgaccccgtcagctggtgcgacgacctgatcagcgcttggcacgattgcggcgcctttccccatgatttcggctgagaaaactttgtcgttaacttgtttgagactttcgctagtccccgttactggtgcactgataatctcatcattaacattgatgacggtactcgttggtgctagtgattttacttgatcacgatcgtcaccgagtgttcgtttggcatagataaaagttggaataaatgcgacgacgaacgagatgacagcactgagcatgaatgctggaatcgactttgaagcaatcgaaatgaacccgatgactgatgcgggacccatcgccacggacagaacgtggaatagtcctaagaaagctgaagcaattcctgaggcaatcgctgcaaagacaaatggaaatttcatcttgaggttgaccccgaaaatagcaggttccgtaattccgagtaacgctgagaccccggctgaagaagtcagggctttttgcttttggctcttagtggcaaagaaaatagctaaagtggcggcaccttgtccaatgttggccatcgaggcgactgggaagataaaagaacctcccgttttggcgacgttagccaataactgggtttcaatagccgggaaggtttggtggagcccagtaatgacaatggccgagtagagaaggccaaagatgcccatgccaatccaaccagtcatgttatataagcctactaaaccgttagttaatgcgtcgctcaccgttcgtaagacaggaccgacgattgtgaaagttagaaagccagtgatgacaattgcaaacattggcgtgaacgtaaagtcaaatgcacccttgatatgtttgtggaagaacttctccaaagtagccaaaatataagcaacggccaaaacagggagcacttggccttgatagcctgcttgtgcaacgtgtaaaccaaagacgttccagtaaaccatcttgccggcagccatggtcgttgcaacgctatagccgttaactagtgatggtaagaccatgatcatgcccatcgtagcacccagataggggttgccaccgaagcgcttcgttgctgaaaatcctaagaggattggcaagaaagtaaacggcgcactagccatcgcgttaaccatttcggcgatacctttgaggccagggtaaacttcaacaactgacttcgccataaaaagatgctcggcagtcaaaacgttgtttagtgccattaatagacccccagcaactagtgcagggacgattggaataaaaatatcagataagactttgaggaagtccattaatggatttttcttttgacccgcagcggcaactgccttgatgtcatcgggggtcgcttctttaagacctgttttggcgattaaggcgtcatagactttatcgacatcgccagggccaataatgatttggtattggccgttagtttcgaaggtccccttaacgtccgcgtcgtcatctaaggcttgttgatcaatcttggattcatccttgatgaccaaacggaggcgtgtcgcacagtgggcggcggcttgaatgttgtttttaccaattgcattaagtacgcggtcggcaacttcttgatgattcataataattcactccctgagtctaaaattatttttaataatgcaagcgctttacagacccaataataacaagtctggaaaatatgtcaagcgtttgatacaaaattggattgcttgataatcttgttaaaaagccgaatttgaaacgctgacatgaaaatataatataaaaatgtcaaacgattgacatattggtgtaagcggttttataatggtaacaattaagtcgaacgttaaaaaggagctcatcgtcatgatatggaatcgtaaaacccgttataccccttatgaacagtggccagcaactaagctaccacagctcgttgcccaggcacgccagtctaagtggcggatgcaacatcatattcagcctacatcaggtttgttaaatgacccctgtggcttttcatactttgatggtcagtggcacctgttctaccaagtctttccgttcggtccggtacacggactgaagtcatggcaacacgtgacctctaagaacttggtggattggcatgatgagggcttagcgattcgaccagatacgccgtacgactcacacggcgcgtacacgggtacagcactaccaattgatgatcagttatttattatgtatacgggtaatgtccgtactgccgactggcaacgtgaatcgtatcaattaggtgcctggatggacacggataatcacattaaaaagctgtcccggccactaattgcgcatgctccggctgggtacacgagttcgtttcgtgatccggacttgatccggactgaccacggctactacgcgctgatcggtgcgcagacgactactgagatcggtgctatcttggtttatttctcaaaggatctgaccacctggacgtgtcaaggcgagttgaacgttcccgcaaatgcgcggggttatatgattgagtgtccaaatctggtctggatcgatcaacagcccgtcttattgttctgtccccaagggttatcgcaagcaacgatcccgtatcagaatatttatccgaacatatacttagttgccgatcaattggacctagctcaggcacaattcactgaaccccacgccctgacgcaattggatgacggctttgacgtgtatgccacgcaggcaatcaatgcgccggatggccgcgcgttagccgtcagctggattgggttacctgaaatttcctatccaactgatcgtgaaaattgggcccattgtttgagcttagttaaggaactaacgcttaaagatgggcacctctatcaaaatccagtggcagcggtggatgatttgcggacgacggcgcatgacctagtctttgagcaacaacgggcgacggtggccgctttgaatggcagctttgaactcttactgacggttcccgctgataaaacggtcacggttaacattgctgatcagcaggaaagtggccagctgcaggtgactgttgatgccaaccatggtcaggttatgattgatcggcggcatacggggaattcgtttgctgaagattatggtcagactcgtcaagtggagttaacggcccataagacgataaaaatccggctaatcatagatgtgtcagtctttgaatgctatattgataatggctattccgtgatgaccggccgtttcttcttaaacgctaccccgagtcgccttaacgttcaaggtgacactacggcagttaccggtaaagtctgggaatggcgccaatcagagcatactggagtcgataacaatgaaaccaaaattaaatgatgttgcgaagctagcgggggtctcagcgacaaccgtttctcgggttattaataaccatggctacctgagtagtcagactaaagaaaaagttttcgcggcgatgcgagaactgcattatcagccgaataatatggcacgctcactgcaaggaaagaatacgcgcttaattggcgtcatcttttcagatattagtaatccgttctttggtgaactggtgtcccggattgaaaaaatcttatttgctaaaaattataaggtgattttatgtaatagtgcggatgatccgcaaaaagaacgcgactacttacaaatgttgatggctaatcaggtcgacgggattattgctggtgcccacaatttaggtattgaagaatatcaacaatatggtcttccgattatttcatttgaccggtacttatccgacaatattcccatcgttagttcggataattaccaggggggctggctagcaacccagacattgcatcaggcgggggcgactaacgtggctatttttactggtaagtcacacgctggttcgccaacgaatggtcgccgtgaaggatatgaagcctacttgactgcccaacagctaacaccccatgtccatgaattaccgtttgaattgacccctgcgctgaagatgatggaaattaagacgattatgacacaacatcagtatgatggtattttttgtagtgatgatttgaccgctttactagtgctcaacgtcgcgcgacaactgtcattaacggttcctgagcaattacgcgttgttggttatgatggcacggcgctcatacgtgattatcattctgaattaacaacagtagaacaaccgttagcggatattagcacgttactggtttctctactattgcagcggattgaggatgcgaattgtacactggaatcaaaatatacgttaccagttaagctcatcaagggccttaccgcgtaactaaggagttaatcgtaattatggcagcaacaatcaagtggtggcaacaagccgttgtctatcaggtctatccacggagttttcaagataccaatcatgatggtattggtgacttaaaggggatcacggcccacctagactacttaaagcaattaggaatcgacgtcatttggctcaatcccatttatcgttcacccaacgatgataatggttatgatattagtgattatcaacaaattgcggccgactttggcactatggctgattttgatgaactattgcaagccgcccatgaccggggcttaaagatcatcatggacttggttgttaaccatacctctgatgagcatccatggttcaaacgcagtcgccaggaccgcaccaatcaatatcgtgatttctacttttggcgctcaggtaacggcaaaaaggcgcccaataattgggacgcggcttttggtggctcagcatggcaatatgatgagcagacccagcagtattatttacacacgttttcaacaaaacaacctgatttaaactgggagaatccgaccttacgagagtcagtttatacgatgatgacctggtggctgaacaagggtgttgacggttttcgaatggacgtcattaaccaaatctctaagttacccggattaccagatggtccactgaaaccgcacagtcagtttggcgatgctcgagtaacgaacggaccgcgagttcatgaattcttgcaagaaatgaaccaagaagtgttgtcacagtttgatatcatgacggttggtgagacccacggggtgacaccagcggatgcgctgaagtatgcgggcgctgatcagcacgaattagatatggtctttgaatttcaacatctgcgacttgataatagtcagcatggtcttggtaagtggagtacgcgtaagacaccgttagtggcgctaaagaaagtcattagtgactggcaagtcggacttgaagggcgggcttggaacagcctgttttggaacaatcatgatacgccacgagcggtctcacgttttggtgatgaccgaccagcatatcgggtacgttcggctaaaatgctcgcaacgtgtttacacctcttacagggaaccccgtatatttatcaaggtgaggaactggggatgactgacgctcattttactgaactagccagttaccgagatattgaatcgctcaatgcctatcgtgatttagtgactgagcgccagctgctatcaccggcagatatgatggcccgattagcggcgcgttctcgggacaactcgcgaacgccgatgcaatgggacacggaggttaacgcgggttttagtgacgcggcgccatggctcacggtcaatcccaactatcgtcaaatcaatgctgccgcagctttggctgatccggattcagtgtggtactattatcagcacttgattcaattacgacatcaataccccttagtgacgttaggttcgtttgagctcttgtgggccgatgatccgcaggtattcttatatgcacggcaatgggaagggcggacctggctagtttgttgcaatttcacagccgagacactgtcccgaccactggatcaatatctgacgcccacggccaaatgcttgattagtaattatggcgagcagcagccaaataaattacggccttatgaggcttgggtctaccaactcgcataggtatccaggacttggctaattgaggcggtccttgaaatatacccaatcgttacgattagtgtgaattgggttgctcaaaattctgcgatggtcttaataagcgaccacctgactaaaaaactgcttttaaaaggataacttttgaaagcagtttttttagcgcgcgacgaccacttggcccacgtgaggctcatctagtcgttggtgacctggaatgaagcccgtgaggttaaacggtagttgttcatcgatcgtcgtggtcaattgaccagtatctagcaacttgaatagtaattgtaaggcggcttgatcagaaatcacttcggtcggttggattgcttggaaacgaattgatttactgttggctggcaagtgacgggcgaatgaagcgatggtcgcatcaaatttggccgttgctaagtcatctttgccaccaacgccatcgatagcgacattgattacgacgtcaccgcggtcggctaacacgtgaactggattttgatgctgatagtcgacgaattagccgactcccagtgtcgcaatcaagttagcataacggtcactagcaatctcgataacgtgggcatctaatcgtttggctaactgaataattaacaagccgactgggctgccagtgcctttgacaatcaccgtttggtcggcctggacgtccgcaaagtagcgcaccgttttgtaagcgacaatccctggagtgactaagctgacggcggtgaccggatcaagattagttggcatggtcaccgctagatcgctatctaaacaaacgggtctagaatttttggtgttggaaagtatttccccagtttacaattcaagtgcaacaccctgacgactagaccataaaggccatgaaggcctattcttgttagtgctagctaaacaagaaagcaggaatcttcatgacccactctcagactaacacccacaagcattaccaacaactcagttttagcgaccgtgctacaattcaggcccttcaggctgcattattttattaattatttttttaactcgtcgtttgtaaaattaagttagaaataaaaaagccatttgtggtagacttttgaatatccctaatcaaaagagaggtaaccacaaatgacttataaacatcttaccacatgtgaattaacctttatatataacttttggaaataagatattaaagcctatcatgccgctaaagctcttaaacgttccagcgaaaccgtttatcgtgtttaccggtttctagatgctggtaattcaattagtcaatttcaagaaaatcatcgagttaataaaactcattgcggtcgaaaagcaattgaattaccagaagatgaaaccaaatacattaagcagaaactcgcattaggttggacccctgatacgattattgttcgagctgagatacagatcagttgtagtatgagaaccttataccgactttttcaaagaggtgttttcaatgtgaaattgttgccaatgaaaggtaaaaggcatccaaatggttacgttgaacggcgtggtaaagctggccgactcggcagaagtatttatcaacgctatcaggattatcctcattttcaacatgaatttggtcatttagaagcagacaccgtccaaagcaaagcacatcaaggtgcagttatgaccttagttgagcgtctctccaaagttgaaatcattttaaacatccaacaaaaatcggctgaatgcgttaataaacatcttaatcaatggttgtcccaacagccaaaacaccttttcaagtcaattacttttgataatggtaaagaattcactggttggaaagaaatcgcaaataagcatgatattagtacttattttgccgaagttggggctcctaaccagcgtggcttaaacgaaaataataatggactaattagacgagatggtctcaacaagagcatggattttcgcaatttaccaaatgctttagttcaacaagtcagtagccggcgtaatcgtattccaagaaaatcattaaattataaaacaccaattgaggtattcatggaaaacatcacagataaacagctatgttatttctaacttaatttgacatttcaagagactaaaaaaggcgaactatcgcatttatgtatgccatttctgaaccacaaaaattttgaaagcgccttgattgctaatttatatataaatttaaagaatgtctaataaatttgcttgttaatatacaaatttaaaaattagtcatttttttggcattttttacttatattatatttcaaaaattattcttgttgaaataatttttgcgaagaaaatgagattttcttactgaataaccgaattacccacccaattttcatttttcgctattccatattgaaaatgtacttcaactattttcaataataatttgctcagtttatttttttatcactagttccactctcctatttttagcacgccccgctgatgtatcgttagttgctttggggttattttcaccaaaagcttcaattgagacgttgccttccgtcactgccttttgctgcacgaagaaccgcatgactgaaactgctcgagcagcactcaattcccagttacttggatagtctttcgattcttgtggcacattatctgtataaccagcaataatgacctcattttcttttagttgttgaatttttggccccagttcctttaaagctgcagcagaatcggcagtcagatccgcactaccgctgtcaaataaaatattgctatccaaatttaaatgtagtccgtcagacttgagtgaagcttttgtgttttttcccaagttcatctctgcagcagtttcgtttaaactatgagcaatttcttttaattgctgttcttgattctgttgtgaaatactgccctttactccattttcttgtttgatcgctgcttttttagttttagggtccggtgcctgactatctttttctttattagttactgatggtgaatcaagttcgattgcgtttgatccaccgactgccgcacttttatgattttgttgctctggtgacaaagccatgatcgacccaaactctgaactgattttttggaacttactatcatcgaccttggctgaagcaaacatcacaataaacagggcaagtagcaatgttaacatgtcagaataagggagcatccaggcttcactatcactatcattttttttctttttcttacgcatgcctgtcccactttctttccaatctactcatttttttcaatgtcagttcgtctggtttcactgatcatactttcaaggttcttttccattgttttcgctgaaactccttcttcgatcgccaatgtccctgccatgatcagttctaaattttgaatttcttgttctgatttacgttgcagtcttttagcaaaaggcatgaacactaagtatcccataaaaataccaaataacgtcgcaacaaaggccgatgagatcgactctcccaatacactaacgttatctaagtgtccaagtgcaccgatcaagccgatcacggcacccatcacaccaagtgtgggtgaagtactgccggcagtttgcatcatggcagttcctttagcatgccgttcctcgatcgatgagatctcattttccatgatttcttcgatttcttctttatcgatcccgtcgaccaccatctccatgccgcgttttaaaaacgcatctttttctggatctaagttgttaacaggcgtttccaaggccaacaagccttcacgcctggcaacatttgataattctactaatttatcgatcgttgcgcggtaatcatacttttttgcttgaaataatactttgaaaattcctggtaaacgtttgatgtcagccagcggatatgtattgatcagcgctacaatgatccccccaaaaataatcatcatggcctcggggctaaataacatggctaagctagcaccttttaaaatcatcgctgccaccacgatgaccaacgcggcacagataccgatcagtaaaaacaggtccattttttctcctcctcttcactcttccattttatttatcggacaaaattgaaaagatttaaggaaactcattaaaaaaatttccaaaaaaataaaacgactacagaattaacaagcctgtagtcgtttcaactaaatattttgtttttggctaacttcattccaagtttccaataattcttctaacaatttaacaatgggcggcagcttttccttgtctttgctgacattagcggccactaattgttgcgtgataaagttatataaacgatttaagtctgtcgtaatttgactatcaaccgaatgatctaatgaaaatttcagctcatcaacaatgtcttgagctctaagcaattcatgatttgcctttaccatatcattttgattcaatgcaatttcagctaacttgattgctttgatgcccccagagatcaataaactgatcagcttgttaggcgaagcggtcaacacttgattcttcaaataaaaattacgttgcttttgtgcctgttttacatccatttattcaattcccccgccatcaatttaactattttgtaattccagcttgaagtcacggatcaatattctaattcgatcatcgtcccatcggtaattttttggtggtaagtcccacccctggaagacttttgacgatctaaactctttaattgctgcaacacttttttcttctctttcgccgttacttgcatcagactctgatattcagacattacttgttgtaaaaccactttttgctgcgctgacaagtttgactcagtttcctgcaattgagtcaataattgatcattggcttgtagtaaagctagaatggaagcagttgtttggtcccagtctttcatattttgctttaacttcgttaatatttgttcaacttctcgtttttccaaacttctgctcctcttttatgatcgttattattgttgatctacacccaactggctttgcatgtattgcatttgtgaatcagcttgcatcatgatcgagtctaactgggtaaactgtgcaatatattgttcccgtttatcggccaaacgcgcggtgaagtcatcgatctgcgagttcaagtctttgaccatcttatcaatgctatcgcttttattagtaatgattccctttttagtagcatcgttgctaataaattcattgactagattatttaatttagcagtatagcccgtgtccgtactttcgtcgaagctgtcctcaccttgaacatagaaaaagtcatggactttttccggtgaatcagctaactgtgacttaaacttgtcttcatcaaggctcaaaacaccatccttgtcaacggaaaagcccatatcaaaaggactcagactagcgccattgtctttatcggcttgtgtgatcatatttctcaaagatgactgtagccgttgcaaggtcgaatcgccaaccagcttaccttgaacattagtcgaagaactttccgctgtggaagctgacgggttgcccacatccaagttacttttgatcaaactcattaagttattgtattgtgttacaaaatcagtagcggccttgactgttttagaatcatcattcttcaaggataaagtgacggcatcttcaggcttgatctcttttttcaaggtgaccgtcgcaccatcgatcgcatcagagatcacgttactatcactttccatgtcaatgccgtctaggctatacttggcagcctgacccagatcagcggaagtatttaagcccaaggcagctaaagtagctgtattctttgtttgatccagtgttgtttctttagcacctgatttgttattcgtcaaaactaggcgtttgttgatcactaccgccgaaacaccaatattttttgattctttattgatcttatcagcaatatcgagtagtgaatccttctctgtaatatcaatatcaacagtttctgggctatcgtcagttttttctccttgataagcaaaagtcagtttaccgttcaagttaagatcagtgctattcgtctctgctgcgctgacctggctaccagtcaacttagtttgcttagctaattgactgaccaaaagttcaaaatcaccgccatttttggcgtcggaatttcctgagatcgttgcaagatcttcattcgagcttttagcaattttagaataataactgtcattattctgcaaggctttaagcttagtttgaaaattacttaaagctgatgaaatttcactccaggcagacttttcctggttatatttcgtaactttattttgtaacagcgttttaccgccagattcagcctcaatcaactgatcaacaacatccgttgtgatcccagagtactggcccaaaaagctgagccctgcattgggtgctgaggtagcacttgtaatatcagccatttacgtcactatcctttcttatcgaccgtaattcccatctgatcccagatttttcccaaaacatcaagcattttatgagaagggatctcctttaacactttgccgctttgcatatccaccatttcaacgtactgccgtccagtccgctgatgaatttcgaatttcagtttaaaatcgcgacccagtaactttttattcaatgtatcaactgctttttgcagttcttgcgggtctacgactacattatcggctgaatcctcaacttctttaacgtttttaccatcatttaactgaaaaagtttacccaaatatttttcctgatctttacgaatgaatgattcatccattaatgaagtatccatttcataactatcagtcgcaactttctggattttattaacagccggcgtgggttcgactggtggaatattattgatctgcatgttacctgtcccttctttccgtgtcttacatatattcactccaatatttctagttaaattctcttttgatttagtcaggctgcgcgggtcaacttctttcggcttatctaagcaacagacttcgatgataagaacgtttcgaaatcagctgttccgacaatgcttggaagtccccgatatgccttcaccttgtttttagtcaggttacgaaatgcaaaagcttgcgcttaactaacttcaacaacaagtcgctaaagacatgacttattgttaaagtcccttaatgctcggcttcataccgcattttctccaccttgtttttcttagtcaggttacgtgagacagaaagctctgcctatccaaccttagcttcacatcgcaaaatacgtgatttgaagctaaggtccgatagtgctcactttctcccgtctcactccaccttgttattaaaaaaaccgaccgccgaataaacgacgatcggcctgtgccaataatattttattagccctgaagtaatgacaagacactgtttggcattgcgttagcctgtgccaacattgatgttgcggcttgtgaaagaatattggacttcgtaaagttcatcatttcttctgccatatcaacgtcttcgatccgtgagttagcttcagaaagattttctgttgttgttcccaggttgttaattgtatggttcaaaccgttttgtacggcccccagatcagcacgctgtcctgaaactttttcaatagcagcctgaatgtgagcaattgagtcccttgcactatcagcagtattcaagtcaacatctttagcagggactcctgctcccgtattttttggatcagtagtaccaggttctgtcgcaagagtcgaagtaccactaacacctaatgttttagcatccatactcccaattttgacttcagcagtttgttctttacttgcaccaacttggaaagtaaatttatcattagacccatctaacaatttcttagtattaaattctgtgtttttagagatatcatcaatgttcttttgcaaagcagtaacttctttagtgattttaccacgatcgtcgttagtcaaagtatcgttggaagcttgcactgccaaatcattcatccggctcaagatactatgagtttcactcaaagctccttcagctgtttgaatcaatgaaataccatcttgggcattacgtttagcttgcttcaagccaccaatctgagccttcattttttctgaaatagccaaacctgcagcatcgtcgccagctttgttgatccgtttgccagatgaaagttttgccaaagaatcactctttgaagcattggcagcagtcaagcgtgagtatgtgtttaatgccggtacgttagtgttaattctcattgtttgttcctccaaatattttgtattttgttgcttacaaatatatatatcggaccagttttaaattgtttaagtcattttagaaattttttccgaaaaaaagagccccatcttttgtgatgtgaccccgttcttgttatgaaatcaatttaataccagtgattcttgacccaatgtttctgtgcgttagtccagctgccgtatctttgttggacatattgagccgcaactttttcttgattggcaggtgaaaaatcaccatgcaaataattttgatccagctgatatttgccaatatagcgtccatttcgagcattatagttattgctcgactcatgctgaataatataatcacgtgcacttttttctgccccagccaatgttggctctaaactgttgctagaactggcagaagcgttctcatcaaggtcaacattcgctagtgacgctactgttccagcatcattgaccatagaggtcggttgcgcagccgcacttatttgtgctcttccaggaatagttaagttctgtccggctagaataaaatccggatcgtttaactggttagcctgagcaacagcttgtgtagtggtgtgatatttctctgccaactcagagacagtatcgccctttttgattttgatcgtttgttgtgctgtttctaaagcattcgaaaactcagctgcttgctgcgaattagtcgcctgtgttgcggcttgcatcgacccattattatgaacttgcaggtcattattaactaaattcatttttaaaacccgtttccttctttaattactatcacgattcctaattatatagtgttttaaaatattttacagtatctttttaatatcgatcgaattaatttgcttttcccagcaattatattgaatatcaagcagcaaaaaatgtgggcgaatgcttaaaagttactgcagccgtaaaaaatggggttattgaagcattaaaatcaattgattctcagcaagtgttggttcttcaaaggcgcccagaatttttagtcgagacaagtccgcaaatacaaattatttttactgatttgatcgtaagatgttgattataaataacaagcgcaaaggttaacaggaaggtattaatggtaaattatgcacatagtctgagtttaattatgagtaattaagtccagaggatccaactgctgaataatatgaacattacaaaaatagtacaagagaccaggtcagattgacctggtctcttgtactatttttatttagattaaatccaatctttacttgatagctccttctgtcacacttgtcatgacttgcttttgcaataggaggaacagaataataatcggaaccattgacaaaacaagtccggctaaggctaattgccattggctgtttgtttcaccgaagaaagaatacatcttaagtggaatcgtgtacatgccatctttattaacgactagtgatggtaacaggtagtcattccatattttcattgcattcaagataacaactgtacctgtcattgggctgatcgctggaaagataatataaacaaaggttttaaaaggataggctccatctaaagcagcagcttcgtcaagagtttttgagactccttgaaaagccccataaaaaagaataattgagaggcttactgataacccggtgttcataatgaccagactcgttctgttaaggaaattaactttgccaaaaagtgaaagaagcgggatcataattgactgaaaagggatcagcatagtgccggcacaaagatagtagagaattgaactgaaaggccctttaacacgagaaagagcataggcagcagctgccgaaaccaatgtgattacaatgacactggctactgtgataactaaagagttaaagaaactgcttgtaaaatcaagcgcctggtaagcagttttgaaatttgaaaacgtaaagtcccgtgtaaaccataacgggttttgaaaaattcccctttttccctttaaagcattgataataacaatgataaaggggtagaaccagaatagggcaatgattccaaaaagaaagccaagtaagattttagttgattttttcatcttctatccctcccgctttcttgaaagtgctaattgaataaaggaaacaatggttacacaaaggaaaaggataattccggctgcctgagcgtatccctgctggaagtttacaaaagcagtattataaatatacatcgaaatcatctctgtggagcggtatgggccaccatttgtaagtgctaagttttgctcatagagtttaaacgagttggcaagtgttagaaatagactgattgtaaaggctggcgccaattgtggcagcttgatgaaaaagaaaatctgggttgcttttgcaccgtctagaacagctgcttgaatggtattcttaggaattgcattcaagaaagaaatatagattaacataatataaccgctcatctgccaaacaaacagaattactatcccccaaaagcctgttgaagggttgctcaaccaacctttgaaaaagtcaagatgaaaagcagcggcaattgcctgaaaagcagaagtaaaaatgaattgccagataaaaccaagtagtattccgccgatcagatttggcatgaagaagatggttctgagtgattttgtgagtctgttgttgtgactggtgacgattaacgcaaaagccaaaccgactaagttaattagaattactgaaacaaaagaaaatttaactgttagccaaaaactctgcagaaaggtggagtcttgaaaaaggacttcaaagtttttccaaccaataaaagaagagcgtaaaccattggaatcggtaaaggaataataaattcctatcagaaatggtacgacaataatcaatagtataaagaaaactgctggtaaaacaaaagccagatattgatgttttttgataagcatttttatcactccccactttggatttccctgagctgtcgatatttagccgatgtttcctttttcaattctttccaagagatcccatttacaaaatagcgctgtatatatggcccaagtgcttggttagtaaagccattcgggtactgtttgtgaacaggagattgtgcgtttttggaagtgccgatccgataaatttgtttagaaagatcatcaggcagcctcgaaacatcaaagtttttagttgcaggaacgaaacgcatttcgttaatgattacgttctcagcttcttttgaagtatacatccagttaataaaatctttagcagctttttgccgcttgggatgatctttagtgattcctaaataccatgaggaaccggttaaaagacggtcagtaccatcatttttaacaaagaacggtaacatgccaagatttttttgcacgtatcccttttccagaccatcaagcgtcggaataatccaatttccttgaggtatcatagcaactttaccattgaaaaaaaggtcttggacagaaggatcatatttaactgaaagaatcggttgtacattatatttttttacgagatcataataatttttcatttgcctctcgtatttccaagggaaagttttgcttttgaaagctttgacaagattattgttgtacggcagagaagtaaattgtgctgaaacagaagcaattgaattggtatcagctccgttaaagccgaaaacggcatcgattccaatcttctttttttctgaattgagtttttcaaccgctttcaaaaattcagaatagttattgatctttgaggcaccaatcccagccttagcgaacacagctttgttatacgaccagccataagcctcaagattgactggaattccaaccatacgtttatttgaaattccaccgctaacaagatttggtactatgtttttacttgccttaagatcttttagattaatcaaatgatccttataccgatctatttcaggtagcccgccaagcataataatatctggagcttccccagaggcaaacttcgcttgtaaagcagcggccccaccgccttgacctgaagtagtaatttggatattgacgttgggatgtttagcatgatacatccgcgctaatttttgatattgtgcggttatttcaggcttttgattaaaaaagttaagtgtaatttttgaatttttttccttttgcgagctaaaactacaacatgttaagacaattaatgataaactcaacataaaagttagcttagcgattttaaaaaatctttttttcatgtcttccgccccgattcattgtcaattgtttgtcaagagcaccattctttcttacctaaattttatgtttttattatgaatcactgcagaaacaaaagcaaagaataaactcgaggaggcgtttcttatgagtaagattcaaatcgaacacctttataagcgttatgataatgcgggaaatgataccctaaaggatatcaatcttgagattgatgacaaggaatttgttgcaattattggaccatcaggttgtggtaagtctacactattgcgttgcttttcaggtttggaagaagttacaaggggaaaaattaatgtagatggaaagcgcttcgataatattccaccgcaaaagcgcagcattgcaatggtttttcaagattatgcattatatccacatatgactgtttacaataacatggcgttcaacttaaaacttagtaaattttctaaaagtgaaattgattcacgggtcaaggaagcagcacaaaagcttaatctcacagactatttggctcgtaaacccgcgcagctttctggtgggcagcgacaaagagttgctttagggcgtgcaatggtgcgcgcacctgaagtctttttaatggacgagccgctttctaatttagatgcgaagttacgtgtttcaacgaggcaggatattatcgagctacataagcagcttggaactgtaacgatttatgtaacgcatgatcaagctgaggcgatggcaatggcggataaaatcttgatcatgcgagacggagtggtacagcagtatggtaaacctgaagaactttatgataacccgcgtaacctcttcgttgctcgttttatcggttctcccagcatgaatattttaaagggtactctttcgaacaagggaatttttaattcaggtggtgtaaattatgaccttagtgaattcgtgaaaaaagaagttttgccaacggataaaagagagattgtacttggctttcggcctgagaaagtaacgcaggtaaaaaagtcaggagataatgatacagctcctgaaaattctgcacaaaaagagggattttttgtactttctgcaagtaaaaatctggctgaatacatgggcggccatacgcttgtctatctaaaaactaaagatggtgttaatattgtgactcaaacgcctaaaagaattcctaatgatgatagccacaaaaaattagatctttatattcgtaattctaatatttatctgtttgatgctaaaagcggtctgacacttcaaaatggttagctttaccagataagaaagaaaacggttaagttggagagaaagatttgcttaccataaaaaagcaaaaacgtactaatttgcaatttgcatgttaaagatataaacaaaggaaccgtatcaaaaatcacattttgtttcggttcctttattttatctgaaaatttacattgacaagacacctctaaaaaggtaaaacaataagcatgtaccagggggtgtcttgacactttgaaaaatttattaggaggactttggatgaactcaacaagaaaactagtaacggttacgggactagcgtggttatttgatgcaatggatgtggggatgctttcttttgtgattgacgctgatcggtttatcccactacaagaaattcacaatgtgtcctttaaaaatacggagaagctataaatttctagctctccgtatttttcttaacgctttatttgctggctctgttttgccctatttgttttattttagcctttagccaattttacttcaatgcaggcaaaaaaattcacagaccattaccattaattgataacgtttttcaaatcacctgataaatatgcttttatattatcaacagttatatgcaataaccgttctcttgtttcatatggtgcccaagcaatatgtggggtaatataacaatttttggcctgtaataatgggctatcactagcaatgggctcccctttaacaacatcagtggcgtaggcataaattttgccttcattcaaggcattcttgatgtccgcttcattagccaatttgcctcgggccgtattcaatataataaccccgtttttcattttggcaatcgtatcattattaattaaatcaattgtttctggtgtttggatcacatgcagactaagcacatcagattgccttaatagttcatcaaatgaaacctgctgaatccatgattcaggaacctttttaggacgatgattatagaaaataactttcatagaaaaagcgtgtcctattttagcaactttttgcgcaatatggccataaccgattagtcctaaagttttaacttttgacttatataaaacaggatgataagctgtcttcataatctgaagatatcgcttttacaaaaaggagtgattttatgcgcgcagtaacatggcaaggaaacgaaaaaatggaagtcaaaacggtcccggatcctacgattgaagaaccaaccgacatgattgttcgcatcacagcaacagctatttgcggttctgacttgcatttataccataacgggaaaccggtcatggaagaagactatgtggtagggcatgagcctatgggcattgtagaagaagttggttctgcagtaacgaaagtgaaaaaaggcgaccgagtcgttatccctttcaacattggttgtggagagtgtcatttctgtgctaatcatatggaaagtcaatgtgacaattccaaccctaatccaatgtttgatcaaggcgggttgttcggttttggtaaaatggaaggaaattatcctggaggtcaagctgaatacttacgtgtcccatttgcggattttacttcttttgttgttcctgatagtgatctaccagatgagaaggtattattcctatcagatgtactgccaacagcatattggagtgtagaacatagtggtatgaaaccaggagatacagtaatcgtattgggttctggccctatcggattatttgtacaaaaatttgccaaaatgaaaggtgctaaacgtgtaattgccgtagataacgtcgatcatcgtttgcagcatgcgaaaaaaatgaacggcgtagagatcgtgaatttttcagatgtttctaaagttggtagtgaattatatgaaatgactaagggtggtgctgaggtagtaattgattgtgtaggaatggatggtgtaacgccaatcaaagaaaaaactaaagatattcttacgccgcaaagcggttcttactcaccaatacaaacagcaagtgaagctgtgaagaaatttgggacgttgatggtaactggggtttatatgactccagcaacgaatttcccgttccaagatttcttcactcgtaatgtgaatattaaaatgggacaagctccggttatccacttgatgccgaaaatctatgacatgattgaaaaaggggagttcgacccatcggatatcattacacatacaatgcctttggagcgtgctgctgaagcatacgatatttttgacaaaaaagcagataataacattaaagtggtattgaaaccaggtatgtcttaaaaaaaatagtgggtctagcaaataactagctctaaatataaaaaacgcgatgaataatcataaaaaggaggaattttattatggcaaaatcagttgcagttttggtgactaatctagtcgaagacgttgaatatactgaacctgtagaggctcttaagtctgcaggacacaaagtgacaacgatcagctttgaaaaaggcactgttgaaggtaagcatggtactcagattaacattgataaatccattgatgaagtgagtcctcaagactttgatgcattgttcatcccaggaggattttcaccagatcaattacgtgcagaccaacggtttgtcgaatttaccaagttctttttggcaactaataagttaacagcaagtatttgccacggtccacaattaatgattcaaaccgggttagtgcaaggtcgtacaatgacagcatatttaactgtacaacctgatttgtattatgccggtgcacgcattgaagacaaagctgttgtgatcgatggtaatctaattaccagtcgcgaaccaaaggatatcccagcatttaatgatgccttcctatcagctttataatgttgatattgataagcattcaaacctatagcttgatgagtttgcctcttttaaaataaatttttaaacagttaccgttaaagtaacttattcctcgtgttagtaacccgggggatttttatatagacgtttttaaacccccgttgcgcaattaaactgaacttatatttctaaaacatactaattaataaaagcctagttactgaccaatttttggttagtgactagccttttattttattcataaggtagattgcaaatttaatccgaatttttggacagatttgtcagcataacctgatacggtgtttgcgtttaaggagaccttggaccactactttgacttgcacggacattatcctgatgaagtactagcggacacattatatcgtaatcgagagaacctgaagctatgcaaagacttaggtatccgcatctgtggtcccaaattggggcgtcatccgaaacacgttaacactgaacaacgccgaaaagatactgacgccgagaatcgacgaggtgccatagagcgccggtttgcctttatgaagggttcactggggcttgatttggtgaacactcgaaccgctgaatcgttggccgtaaagatcgatgaggcaatcgtcctgagcaatgtgttggccctgatgcgggtttttgctataccaatttttgttttggcagaatcagaaggagtaacctatcaaattcgctataaatttactacgaaagttgaaaatatggtggcctaattaaacagccactagttacttgacgccaaatgcggtgtgatcgaaagcgtgagctagaagccgtgaatgataaacttttaccaaatgattaatgttgtgcgcttttcttgtataatgaggagtaaactattcagattgaatgcaatcagctttaggaagaggaattttaatggtttcgagaaaacgcgctttaatccaaaatgccgctacggctttggtgagccaattgattatgatggtcgggcagtttgcgacccaaacaatttttgtgaaaaccttaggcgctcagtatttgggtgcgaatgggttatttagtaacttgatccagtttctctctttcgcagaactcgggatcggtgccgctttttcatatgcattgtataaacctttagctgatcacaatcaagccgcgaccactgccattatggacttgttccgtaaagtgtataacaccattggcttggtgattttagctgctggatcagtgctaacctttttcgtcccttggtttgtggccaaagggtcaagtattgatcatattcgttggtatttcttcttatacttattgagtaccgtggtgagttatttctttacgtataaccggtcattgctgattgccgatcaaaagagctatgttgatgccaccaatcagctgatttggtcgacattgaagtatgttttccaaatcggcttcctgttgctatttcatagttatttcggctatttgatcgtgttaattgcgacgaatattttgtcgaacgtcttcatcacgatgcgctcgcgccatttctatccatatctcaaagaaaaaagcgatgtcgaaattgatccatccatcgtgaataacatcaaaaagaatgttgttggcacggtctccgctaaaattggctcgattgtggtaacaggtaccgataacattttaatctctaaatttatcggcttagccgtcgttggcctgtattcaaattatgcgctgattttgaccagtatcacgcgtttattgacgcaagtgtttgccgccgtgattgccagttttgggaatttaggtgccactgaaggcaacaacaaagataaacaagttgatttatttaatcagtttacgttctataatgcgttttcggttttctttatcggtttggtttcatttgcagcttttccgccatttattaaattgtgggtgggttcgcattatcaactggcagagtcaacagtctggtttattgtcatcaactttgtgtttggtcaatttcgaccggcacttaatatgatcaacgcttatggtttattttggggttatcgcgtgaaatcaattgttgaggcggttgtgaactttggtctcagtttgctactggtgaaatttactagcttaggcattaatggcgtgttgcttgggacgattattggcaatatcctggtcaactcttggtgggatccttggattttattttcaggtgcttaccaacgttcgatgctgggtttttatgcgaaatactggatttacatggccgcttttggggcattgcttgtgattgaaagcttcatcatcaagctggtggcaatcaatcctgtaggtttattgccagtaatgggctacatgatcgttgtagctttgatcgtaggaattgtgttactgggcgtgtttgcgaaaacgcgtggtgaacgagaaatgtttcgattgctcaagaatattgtgcatcgttgagagaacttctttaaatatttggcaaagtcagcaaattactagttttcccatttttgaaacccagtagtttgtgataatctaatactgtatgttttggttcagcgacactggaagctgagacttaaaaccagggaggatttcttagaaatgaaaggtattatcctagcaggtgggtccgggacccgattgtatccaatcactcgggcgatctcaaagcaactgatcccgatttacgacaagccgatgatctattacccaatgtccacgttgatgttggcggggatcaaagatatcatgttgatttcaacgcccaaggacttgccacggtttgaagaattgtttggcgatgggcatgacctcggcttgagcttagaatacaaagttcaagaacatcctaatggcttggcggaagcgttcattttagctgccgactttatcggggatgattcggtttgcttgatcttaggcgacaacgtcttttacggcggcggcttgtccaagatgttgcagcgagccgcttcgaagccggttggcgccacggtatttggttatcacgtcaatgatccagaacgcttcggggtggtggactttgacgaaaacatgcatgccaagtccatcattgaaaagcctgaacaccctgcctctaattacgccgtgactggtttgtatttctacgataacgatgtcgttgaaatcgccaaaaacatcaaaccttctgcgcgtggggaactggaaatcaccgatatcaatcaagaatacttacgtcgtgggcaactcgatgttgagctgatgggtcggggatttgcttggcttgatactgggacgcatgaatccttacaaaccgcgtctgcgtttatcgcatcgatccaacaccggcagaacttgcagatttcttgtcttgaagaaatcgcctaccggatgggttacatcgacattcaacaagttgaaaagctcgcccaaccgttgaagaagacggaatacgggcaatacttattacaattagtccaaaacgaaaccaaataatcactgatacaactcagctcaatatggaggccaaatagctatggcattaaagatcattcccaccaagttacaagacgttaagttaattgaaaccgatgtgttcggcgacaaccgtggcttcttcacggaaacctacactcgtgaaaaattcgttgaagcaggcatcaccaatgacttcaaccaagataaccaatccttgtccgctgaagccggcgtcttgcggggcttgcactaccaatacggcaaagatgcgcaaacgaaattagttcgcgtggtcactggtgtcgttgaagatgtcttagttgatatccgtaaaggctcgccaacatatggccaatgggaaggctacattttatctgaattcaaccaccgtcaattgttggtcccaaagggctttgctcatggtttcatcacgttgactaataacgtcaacttctgctacaaggttgaaggctactatgcgccagacgctgaccgtgggatcgcttttgatgatccagatcttggcattgactggccaatgagcacggatcatttgatcatgtctgaaaaagatttgcaccacccacaactcaaagacgctgataacaactttgtttacggggagatctaatcatgaaaattatggtaactggcggtgccggcttcatcggctccaacttcgttcattatgtgtataataatcatccagatgtccaaattgttgtgctcgacaagctgacttatgctggcaatcgcgccaaccttgaaagtatcttaggtgatcgtgtgcaattggtcgttggtgatatttgcgatgctgaattagttgacaagttaatggctgacgtcgatgcttgtgtgcactatgccgcagaatcacataacgacaacgccttgatcgatccatcaccattcttgcattcaaacgtgatcggcacttacaccttgcttgaagctgcccgtaaatacgacgtccgcttccatcatgtctccaccgatgaagtgtatggtgatctgccattgcgcgaagacttaccagggcatggcgaaggcgaaggggagaaattcaccacggaatcgcgctacaacccatcctctccatattcttcgactaaagcggcctcggacatgttagtccatggctggactcggtcgtttggtgttcgtgcgactatctctaactgctccaacaactatggcccatatcaatacattgaaaagttcattccacgccaaattactaatattttggctggcatcaagccgaagttgtatgggactggtaagaatgttcgtgactggattcacaccgaagaccactcttctgcggtttggactattctgactaaaggcaagattggcgaaacatatttgatcggcgccgatggcgaacaagacaacaagactgttttggaaatgatcttaaaagacatgggtaaagacccatctgactacgaacaagttaaggatcgtcctggccatgacttgcgttacgccattgactccacgaagttgcgcaccgaacttggttgggcacccaagtacactgattttgattctggtttgaagcacaccatccaatggtacaccgataatcaagactggtggcaagctgaaaaggctgaagtcgaagccaagtacgctaagaacggccaataatctttgcggtcatggtcgtcattgcagaaagcgaagcgctcggcttcgctttttcgttgaaggagaataaaataaatgaaaattttgatcactggtgccaacggtcaactcggcacggaattacgtcacttactggatcgtcgcggccttgaataccgtgccactgatgccaaagaactggatatcaccgatgctgatgcagtgaatgcttacgtcaaagacttccaaccagacgtcatctatcactgcgctgcctacactgccgtggataaggcggaagacgaaggcaaagccatcaaccaaaaagttaacgtcgatgggacgaagaacttggcagttgcggctggcgagaatgatgctactttggtttacatctcaacagattacgtttttgatggcgattccgatgaattgtatactgttgaccacaaaccagccccacgcaacgaatatggtcgtaccaagtatgaaggcgaactcgccgtacaaaagtatgccaagaagtattacatcatccggaccagctgggtctttggtgaatacgggcataacttcgtctacaccatgttagatctcgccaagacgcatgacacgttgactgtggttaacgatcaatacggccgcccttcatggacgaagaccttggctgaattcatgaccttcgccatcgatcaaaagctcgaatatggcatctaccacttgtctgaagacaactcatgtaactggtatgaattcgccactgagatcttgaaagacaccaacacgaaggtcttaccggtcacttctgccgaatacccacaaaaggcatggcggccacgtcattcgatcttagatttgtctaagaccaaagcaactggctttgaattgccgacttggcaagatgccttgcatgaatttatggcggaaatcaaacagaagtagtgtaagtttgtagcacttatggtgacttcaaagtgtgtgtgacgaagtccatatgtttcgtaagaacatcaatgaataaaggatttaaaacaaaccaggtttaatttgtacttgagctgagcgggggttggaccctgctcttttttgaaatgggggaaaaatatcatggtaaaggttcgcaaagcaattattccagcggcgggtttaggtacccggttcttaccagcgacgaaggccttagcgaaggaaatgttgccaatagtcgacaagctgaagacggcatatagctttaccaggtaatgcgaagtttttgacaccactcggcgaaaaaattgtccaaggtcggcgaagaaattgaccaacaatacagaaacctcctgtatactatgggtagcatacgtgtaagcgcgtgcaattcttaaatacaggaggtctttgtaatggctattcattaccgtcaaattcttgagcttcacgctcaagagctggtgcagcgagacattgcggcaatcactgggaattcacgtcccaagatttctgaagttatcaagcaagctgagctacatcagattagtccaccatttactgatgatgtggatgatatttggttggaaagcttgttgtttcctcagaagcaaccgatggcaaaaggtcggcagatacccgacttcgaaaagatacacgaggaattggctaagcctaacgtcaccttatccctggttcattatgaatatgagcaagagtgccgacaaaatggcacaattccgtatgcgtatcgaaccttttgccagtattatcgtgcttatgcgcagaaatataaggcaactatgcggatccggcgtaaaccaggtgaagtgatggaggtcgattgggcgggctcacctttgcatatcgtcgatcgcgaaactggagaaatcatcaaggcatatctgttcatcgcttctttgccgtgtagtgcgtacagctactgtgaggcatttatgactgaacaacaggaggcgtggcttactggacacattcatgcgtatgaattctttggtggtgtgacgcaatatctgatttccgacaatctcaaaacgggtgtgacttcgcacaagcatagcgaaatcatcttgaatgaaatgtatcgagatctagccttgcactacggcacaattgtgatgccagcacgagtccggaagccaaaggataagccgactgtcgaaggtgttgtggggacagtatcaacatggattatagcagcgctacgaaatgaaacattctttggcctcgaggaattaaataaggccgttcgcatcaaactcaaggagttcaacgaacggccattcacaaagaaatataaacaaggtagtcgcctttcggcgtttcatgacgaagaaagctttgccttgcgaccattacctgttcaagcttatacgatggccagttggcggactgccatcgtgcaattagactaccacatcaacgtggaaagtcagttttactctgttccttacgagtatatctcatctaaagtggatatcaaggtgacgaaagatatcgtagaagttttcccccagtttacaattcaagtgcaacaccctgacgactagaccaaaaaggccatgaagacctattcttgttagtactagctaaacaagaaagcaggaatcttcatgacccactctcagactaacacccacaagcattaccaacaactcagttttagcgaccgtgctacaattcaggcccttcgggctgtgtttaaaacggaatatcttcgtttaggtcaattacatattgagataacagtttaattacttcaattttactcttagttttatgttgctttatcaaatttgaaaagagttcatcacgtaaaatcataaagccctgattagcatattccgaaagcatctctttaacttgtttttgaactttattatcagcaaattttccttcttcaccatccaatataccttctttgatagcaagtgcatattgaatcccaagatcagatttattcttaaaatatgattgtctgaactgtcgaccattaccatcagaagccggtaactttatacctgacttcataccaatagttagaccaagcataaagatctgtgaaatctttaagtctaaactatcatgcagtaaatcaaaaacgtcttcaaactctttgggtgtatgaatcaaatcatcgacatttaagaaatttaaattttccattacctatacctcctttaattcactaaatgaatcaattgcacgaatcacacttttgccatcttgatctttggtgatacggtaaattttactaactttatcttcactagcaaataaattcatttcattttcacctaattcagtatctgtcaataacaatatccattgccgcgcaaatttaggagtctctctaatcatatttgtccgaacaatactatctaggcgtgcaaacggtgtatctactaaaagtggaaaatcaatgtcagatcgtcctcgagaagacaaatctgctaatgcaaaaataaaagacaatgacagtgcttgcttttgccccatcgaaagatcacctaacacattaacatcatcatcatttaacaacgtaagatcatatgttgttgaaatatctaatttctgcaccaagttacggtctatattagaaagcagtttcttaagcatatcaaggattctttctgataattcggttcgcatattagaatcataagcatgtaaaatacgtgttaaaccatctaaaattctttccgttctcttaaatactttttcctttaacatatcttcattaacaagatctatttgtcttttctcgtctttatccaactgctcttgttcactttctaaattgttcagttggaatttaagctcattaatctgtgtatttatggcatctaatttccggttaattgttggaagactatttacttttttatcttcaacattttgaatagccgctaaatgaccagacagagattcattcattttatcgatttgcagcatcaactgttctttcttttttgacgcctcgataagcgttttatatttctcttttagtaaatcagtgacttcactattttctttaacgtgttcattcgcaatctcaatatcttggaatacatccctaatattagactgatgataattatccaataattgcttaacatgtatttcattctctggatgatcacttaagtcattaccgcataataaacagctaccctgctgcaatgacatttcaataatccttttatcaaacttactgtcattttgttcttgaataatactaactttaggcattaccaaattcatagtgtcattccataaaaaactcacgccatcaaataacagacttttcatattgtcactaatctcatcaattaatcgatcttgattaattagttcttcttcatacctatttagctgttttttttgactacttaattgttcagtattagcaatctctaactcaattgcattcttttcatctccagctaatctaagttcctgacttacttcttttaatttattattgactgtatcaatttctgccaagttggactgctttttactttgaatttgatttaattgcaaatctttagattgatgcgcaatctcatttttttgctgcttaatcagttgttttaaaatatcctctgctttttgtacactctttatctgcaatagattttgcacgctatttttaatcttttcagagacttctgccttattcgatgaatccggaaataactgggattgctctgcgtcaaaaaagaaaaagtttctaacataatcgggcatgatcatatttaattctgaattaacttcctcaacattattagagatttgctcagtttcaccgctagaggttctcttagataatgttgctcttgagctcaattccttaatattatcgccatcagcaatttcaatcttttctcgatgaatctgatacataacgccttcgtgttcaaaacaaacttcgacttctgcggtaactggatcaccatcattttcacgtaagcgatctaagttaactaaatgaacagcttcatgccggctctgattatcttgatctaatttttcgtccccaaagagaccaaacctaattgctctaaaaatacctgttttcccagcgccattgacaccaataatcaatgtaacgttttgatcattttttgcaaacgtaaccatttgaggatcataaaactgcctaaagttttttaattgtaaactagtaatttgcatagtctgactcccccgtattcaagtcttcttgaacaatttggattattttattacttatatgatcacgtatttgtttattattaatattcttgttttctatttcacttaataattgtttaatcacaacctgatctgattcaggtaggctattaatctgagtttgcaaatctgtttgtatcattaatttatttctcctcattttgaatattttcattataaatatcgattgcggatttatccatatacgaatctaaatcaaatttggataaaatcgggccaacaatatttcttgcctcaaactcatttttggcatattgacaaaattcgtgaaacctaggtatttctctcttcaccataactttagcagtatcaaagtctatttcgttaacatcgggtaatacaataaaatcatagatatttgcttgcgttttaccagctgagttccgtaaaattcttcctcgacgttgaataaattggcgaggattggtagtactggctaaaaaatacgcttgacgagtctgtggaacgtcaactccttcatccaagcacttcattgctgctaaggtttttatttcaccgagttcaaacttatttaaaatttgagttcttttttttaatctaagaccactatcaaatttcacaactgactggtttaatttatttccgattagttgggtatatttatcaatttgaccatccggacagtacaataagttatatttatcattgtttttattaaaaactttttgtaatccaatttccttatttgccgcctgctgaataacccgtgttcgcttcctgagtaaatattcatatttttctctaattgaatcatcatcattctttaagagctgaccataaattttaccaatacttttagtcaaagtgatatactcttcgttttcttctatcgttaggtatacaggaatggggtaataattatatggtgttagaaagccacgatcaattgcttgtgccaacgaaaattcatagataattccaccgaacaaattaaatattcgattagtcccttcctcatcccaccagcgttctggtgttgcagagagcccaagcacgctaccaaagctcgaatataccgagataatattaattgaacttcgagatcctaaataatggcactcatcagcaattagaaatacatcctcagtacgctttagcaatttaattaaattattaaattcccacttattggtactaacatatgaaccgataattactaatctatctcgtaatccatggttatattcccatatctgatcttgaagcttttgcatccaattagttttattacccgcaattttcacatcgacatgcacgccggttgcagtcagattctcctgccactgaggaattaaatgaataaatggtactaagataattagtacctggtgtttaaccatttgaaaattggcttctgcacaagcaatgctagtaaatgttttccccgttccggttgccatatctaaaatgccacgattgttgtgactttgaaacgcctgaattgcttttttctggtaatctcttaattcaatcatcataatttttcttcatctgaacagcaccaaactcatttacaataaagagagtgtttaagacttgtggaatactagtagcttgtgcattctgtaatatcccaattttattgagataagctaaaacgtccttaactgatcccccaccttgatactttttcatcatggctcttgttaaatccacaatgtctattatttcagattcataaggaacgataataagcgggtcattaggagtctcaagactaccattgtcaacgtcccattctagtaatcgatacttattcgaatatctgatttcattttttagtaattctttagtccacgaaagtttaaaggatcgttcaggtaaacttggtagattatttgtattgagcattatcattaccaaactgataaactcactatcaatacttttggttgaccaaatattttctatatactgattagtaccatctataacttgtctagactgttgccaattaataatatatttagttaatataaatacatccatatcgacttctgtcatatcattatttcctagcaactgattaatttttgcataaattgattgattaagatagcctactgaattgagaaaattggttaattctattcgagtaaatgtcctttccccagcccagtcatcgattattttttcatttgtaggccttgatttaacatacttaacttgagtgaatccttttagatttggccataaatatgttaataaatcggcaaaatagtctaactctgaaaagtaaacggctatccccttagtagctaatagatcattaaaaaaactagatttttccatgttatcttttatttcatgtggaaaaacatatccttcgtgtaattcaaactgtctttctatttcattatcaaaaagttgtcgaacttcttttgaaattttgatttctatcaaagatatctttttatttcgcatccctaataattttgagttacttacttcatgattcacactactcaatgggattccaatatcagaagatattttttctgctgaaactatctttccatgtttttgaacataattaataattctttgttcaatagttgctttctcagtattcggtaatctaattgactgagtgttcacatatccaaaactaaactcatcgggtagtaggaagactaattctgagtataattcaaacttatttctaatgcccgctttaattaattcatcttcaaacttcttatatacgacttctggtctaatttcttcaatatctataagtctattatttatccattgagtcattttcgttaaaagttgttggtcaattttatcatgattggaaatagcatacgtataatttcctaaatatactatttctcccttatcacacaaacgattcaatcttgaattgaacgctcgaacctcatcagtcaagttatcacgcaatatctttttatgaaatgtatgttggatataagtatttaagtaattaattgattcagtattgacctgcagagtgctatcaggttgtttgttaatacattttataatggcttgctcaattgatatctgcttataaaggaaaagactgttttcgtactgaaaatcatacgtcaacctaattttattcaataacaatttaagctcttcctcgtttagaaaaggttcgaagatggtccttatctctttaacagaaataacatcaatactagttaatttctcatcaagttttattaatgtttttctgataggttgctcatcatttaatggcggcaataaaactggtaatttcccaataatacttggtgaatcaatatcatagaggtattgataatcttcactactcatatcttgttgtaatatcaatactctgccaacaaagttagtaaaacagatatattcccgcaatcgatatcgattaccaatttcaattttttgattttttattttttgcttaagttgacgaacacgttctcttgtgacacccactttctgacctatggattcaagagtacgatattccttattattttcattatcaattttgtaaacttcattaactcgatcattattattcaagtaatactgaaaagctcgttgacattttgtttttattttatcagtcataacttcaagatagattaactcatttatgatttcctcattaccattatttgcattcttgttaaattcaattttactgtctattactgcatcacgatattcttctaattgaaatgctttaattaaattaattagttctcctcgagtaatattagtttcatgatgctgttctcttttaaaccaatctatatattccttatatccatcggatatcatttgaagaaactctttttgttttcgccctttaatatttttatcctttagtaaactaacaaactgtttattattatttggccatataattccgtctttctctgctttctggtcagaaaaaataatttttaaatattcatgctgcccaaaaagaatatatggaaaaacaacgtgagcaatttcttgctcttgttgttctatcatgatgaatgatgaaaattctgaaagtttagttcttaagtcatctatacgtttaggacctatccctttcaacgtagtaagcttaataattacgtcttcagtaatatttttaatttgaaatacattcatgccacgtaaacttttttttataaaagtaaatttgttttcacttagaaaagtatctaaattgtcatttgaatcacttgatacatcggtttctatattgttattttcaagatagtttttattatcgtaggttataatagaaaatccagcatattgaaataccttttcggcatcaaatagttcttctatgttgttgccaaaaacatacggaatagcatcgatacatataccatcaaaataactatcgctatccacatgagcctcggaaaaaaattgttttaaagcaataggaaagataatactttcatactttttattaccaaaagaacctgattttaacattcttgtttgttgtgggagttgataaaataattgttcaccatgattcccaaaaaaacgcccacctcgaattgttatttcaattttaagtaatgtaaataatgacggatttactttgtaaactcttctcagaaaatctaaatctacaatacttatatggttctgatatgtatataaaacttggtattctgtaataaacttattaattaaaaaacttctacagttctttatatcccctaaaaacaaaattttattataatacatcccattcatccaccattctcactttgaaccaatttgaagcgtttaatacttaaatataattagattatactaatgtaattagtacagatcaattagtattttgcgtagttataaatacagtaataacaatgcattcacgtattatatagccacaaaaaactgtgtatataaccacaaaaaactgtgtatatagccacaaaaaaataaaataagtggctatataatgttataataaaagcataaagaaattcccgtctaaaagtttttctttatgcttatccaacaacacacccaaaggagtgtatttatatgactattataccagaatcaaagacaaggcaggtacagaccttgaatgaattatcaaaaagaaaagtcgttgaacataatagtttaatcacatccattgccaagatggataagacaccactcaaaatgtttgaactagcggtgtttttaattgataccgacaatccacctcaggatcagacggtttatttatcaaagaaagaaatgtttgctttctttaaagtggatgacaacgataagcatagtcgttttaaagaggcaattgaaaaaatgcaaaaacaggctttttttcagattaaaaaagaacaagataaaggttttaagtttgttagcattgtgccaattccatatgtagaatggacagattatcatgatgaggtattaattcgatttagtcctgaaattatgccctatttaattaatctcaaaaccaattttacacaacatgccttgtcagaaatttccgaattgaatagtaaatatgccgttattttgtatcgttggttatcgatgaattacaaccaatacgagcactatagtgttaaaggtggacgccgagaagaacaaattgacaggtaccgtaatcctgaaattggtatgaaagagttacgagaaatgactgatacgataacagaatacaaacgattcactcactttgaaacgagagtattgaaagaacctctagcagaaatcacaaatcataccagctttaatgttatatatgaaaaagttaaaaaaggacgcagcattgataatatcgtctttcatatcactaaaaagcaggtggcagatgatattagttacaagttagatgatccaacttatattgacggtaagataaggcaagaagaaagtgaaaaagacctcgtatatgaagctatgaaaagtccatatacaaaattgctgatggaacatttcttgttgtcatatattgatttgacggatacggctattttgtcagggttacagaaaaatgtttatccactttatgacaaattaaaagagttacgtggtttaaagggcgtgaaagaacacttagcatatattcgagataaacaagatgactattctaaaaagaatattgctaagtatcttaaaaaatcgattgaacagtatctaccaatcgttaaaaggcaggatatagatcatgagtgaaaatttaaaaacaatccgagaacttgctgaagagttagatgtgtctaaacaagccattcaatatcatattaaatcactgacaaataaaagtagacaaaaaaatgatagaggaattgttgttttgtctatcgaagaacagcgatttataaggtctaaggtagacaaacaaacaaacaaaaaactatcaaaaaaacagacaaataagagacaaacagacaaacaaaaatcatgggatatcaaccaatatttattaaatgaaatcgaagaagttaaaaaaatagagacgaacaactagcagtcaaagaccgacaattagaaaatagagatttgcaaatatctcaaatgcaaaacttgttagaccaacaacagagactagcgctgcaagataaaaaattgttagaagaatacaaatctgaaatcaaagacctgaaatcattgactacacaatcaaaaccttttgtaaaagaagaagttaatgatcataatgatttagaagagagcgccactcaggaccaaaataaatctaaaaaatggtggccatttagcaaacgaggacgagaaaatgattgattcaaaaattatggagaaaacaggggccattttgaaagattttggtaatacctatttttcagataatggcactttaaagcgccacaaagtacatagaagaccttgatacttatacacctatgttgatgaaagcattgcatttaagtttatggtgtatcatggtgttatacaaattaaaattataggtagtttagaatgaaaaaaatttattttttatgtacaggaaattcttgtcgcagtcaaatggctgaaggatatgcaaaaaaaatattgccggcaaatgagtttcaaatcgagagtgcagggattgaaactcatgggttaaatctaaatgctgttaaagttatggctgaagatggagtagatattagtagccactactctaaattaattgatctaaattatttgaacacttcagatttagttattactttatgtggtgatgccaaggataaatgtcctatgcttccccctcaaaccaagagtttacactggcctttatctgacccagcgcaagccacaggaactttagaagaacaactacaagaattccgtaaggttcgtgacgaaattaaaaaattagttacaagtttgaataactacgttcattaataaaaaaacgccatatagtgccgcagtaaaacagtccaattaatttattgacttctaagtaaaataccaggagttttgctatgagttaactatgatcctaggtggtcactaaaacattccttaatttaggggctataattataaattagataatacattagaagctggagacaagattgtctagataatgtgtgagataaaatttttggcaggttatcatacataagacaaaatgtttttaaaactgataacgtatttatttcacaacaattacgcatttatttttgagaaaaatataaagcaggaggattacaatgctgaaaacttattctttaacaaaagatacattattagtttcgtcagaatcaaatatcaaaaactcttctgttgtctatgtttatggtgacgaacgagaatatatcgaatcttttgaacataaatatgactttaaaataggcaatatactaacgtttgatgatcgagttgcatatgacacgatgatagatcagaacgatgaaaaaagtttgctcgtaagttttttgtttcccgaggtacatgaaggtgggcatctagataatctgacgacatctgttgttttcttggtatttaaaaataagttgataatttttacaaaacaaaaattaaaattcattcccgaactcttatccaatatggttttacgtgatgtcaataatttcatgcaggaagtacttttaaagatcatgcaaaaagatttccatgtgatgcttaacgaccttcgtggagtcaagggaaaaattgatgatttagaatcagaaatatcaacgtccggtccactcagaccaacgtttggtgatttattgactcttcaaaaatacatgatagctttgtcaacaacctatggcgctaatcacaaagcgctggatttcattaacaaaaatttcacaactattaatgatattgattttaccaccaaaaaaataattgatgagatatacgatacaagcgacacaatggatagaattattttaggttacagccaatatttggatgatttggaagatatgataaacaatatgatttcgtatcagctaaacatgattatgaaaactctaacagagatatcaatcgttttgactattccagcgattatttttggcttttggggaatcaatgtccatgtcccgtttgaaaagtcttcttatggtgtttttgccgtattgattatctctgctatactaagtctaatttgctggtttttgctgcgacgcaaaacatatttgtaaagtatttgtgataccctaatatgatttaaagcagaatttctttgttgactttttaaaaggctgattcctttcaataatttaatagcttcagcggcttccttcacagtatgagagttagaatattcaaagatagccatattccggctatctttttttcttttgggtctaccctccttatagttgggattgtgttgccttgcaaatattttaccggcttgcgtacgctcgataatcatatcacgctccatctccgcaaccgatagcaaagttctgacaatcatacgcccaattggggtgttatctatcgttcctaaatttgtactaaaaatcaattttttaaggagctaaaactatgcaacaagttgtcttacccatcaaaggttcaaacgttctcaaagaggtgcaagataccttactcaataatttcaaagctggtcagcgtaactacacaatttttcaggttgggaaagcgacgctactaagagtcagtgacgttatgtgcctaaaacaagcagatgtctttaatccggaaggctccattaaacaaaatgcattcattcacgaccgaaaaacaggcaagcctaataccttgtaccttaaaccagttcaaacagagcttttattgtatcgtcaatggctgcttgatcataaactagaatctgaatggctctttccgtccattcaacacccagaacggcatattacggagaaacagttctataaaatcatgagcaaagtcggcgatcttttaagcattaattaccttggtacccacactatgcgcaaaactggggcttatcgcgtttatacgcaatccaattacaatattggcttagtcatgcacttattaaatcattcaagtgaagccatgactttagcttatttaggcttagaccaagccagtaccgaaactatgttagatcaaattgattttggttagttttatttggatttttagttgttgccgaaggcaacttctgagacagattttaagcacaaaacctccactaatttttagtggagtgtaagtgcgccttgaccgagccttgaccgagccttgctcggtttgcgccttgaccgagccttgctcggtttgcggacccacatagatgttctatgtgtaagtgcgcattaaactcatttcattccgtttaatgacgctaaaaaatagctaacttgatcattaaaataaaaggttttttttagttcaatgcgcacttacacgtcaactaactttgacgtgtttcgataccccaaaaattgtattagatttcgctgcgctcaaacaaatctttttaattgctttacaccgtttttctttctaaacttaatcacaatctttgaataactaactataaaaagatgcctttaatttaaacctgaagtaattagctaatgttaggagtaactcagatggacgaaaagaaagtattaaagccaattgatgaaatgcttgctgatccttggcaagttgatattcaagaattgtttgaagattctgtcaatgaacctgacgagatcaaaaagaatttgtatgattccctatatacttatattttacaaaaaagacaagaagatattattaatcgtcctgcctttgttatttagtcctctaaaagcctgttgagggctttttgtttttgctttggtataaatatatataaacagtctcaaaaccgctaaaaacgaaaaataagacccttaaaaacgaacatagccgctaaactcttgttaagattcagaaaaactaactgtttgctgtcaatggtagcggacgagcaaagcgtgggagcatagtgacttgaatttaatgtgagccgatttttgagtcgctcctttgtgttttttatttgaggtttggctctggtacagtagtacctcttttaaacctcttttagacccctatttagtcctactctcctaagggttacaggactttatcgactacattttgtctgtttatcgactacgcttatttacttctgtattcaaataaagtagtattattcaaggaggttattttatgagcaatgaattagttaaatatgatccagaactgaatacaattcctctgagaagatttactcctgtagaaatgaatcttttcttttcggttgtttctagaatgcgcgataaaggtgatgatactgttcggtttacttttgatcagttaaaagaattaagcgcgtataagccgaccgcaaataatcgatttattgatgacatacaaagtacatatcaaaaaatattaggtcttagatttggctctagaagtaaagatggacttgatagagaaatgtttgtcatgtttactcgatttgaaatcaagggttcggcagaagtcccttatgttgatattcaaatttaccccaaggcattgaaacttctaaataatcttgaaagctgggttcgatatgctttagcagagttcagagatttaaagagtagttatgcaaaaacgatgtttcgtctccttaaacaatttcgaactactggttatgcttatttttctaaaagtgatttttttgaattacttgatattccgcaaagctattggaataaacctgcaaacgttgaatccagagttattcagccaattaaagaagaactaactcctcttttcaggggtctaactattagaaaaaaatatggtaaaggccgtggcaagccggttattggttactcatttacctggaaatcagaaaaaaagaacgcagacgacttctcacaagggcaatttcaagatgaaagacaaaagcttttcaatattcagcataatagtgaactaacagaacatcaaaaatggcgcgccattgataaagttaaggggttaactttaggctcaactgagaaacaagcggtggctgagaaacaagcggaacacgataaaaaaataagagatcaagcaagaaaagaagcacttgctgaactccgaaaggggtttggaaatcatgcctaaaactattagagaacttgctgatgaattgggcgtttcaaagcaggctatatggcaaaagataaaaagagatgcgtcaatcgatttacgtcaatttacatcaacaaaaggcaatactgtttacgttgatgttgatgggcaaaaagctattaaagcaatgctctcaaacgattcgtcaacaagataccgtcaacaaaaagatgatgttgacgacaacaaaaaagatgcggttgatggacaagatgaagtgaaattccttcgaaatttagtatcagaaattcaatctgaaaagaaagagttacataagttactagatcagcaacagagattggccttacaggacaaacaactgctcgaagaatacaaggcagaaattaaggacttgaaagccttaacgatggcaccgcatgatgatggtgaaaaagaagtgacgtcagacaaacaaccggaacctgaaaatagcaccccggagtcacaacctaaacctaaaaagtggtggcgttttggtaaatagttacaactaaaaaagaaaagaagactagttaaatagcgggagataaatttgaacaagctgtagctgccaagctaaagggtgagggctgggactgtcccacagattattctggttgtttgctttttaattcgtgtgtgagtggatatttttcattcattgtcaatggccatttggatttcatgtatttcattatgaaatacttacaaaaaagtatagaatctcatcataagagaacaatatctaatttctttgctttttcgtagcgaacttgtaaacaatgtgatctaattaaatttatatattatttataagaataggagtattgaaatggctgaaatgagttttgaacgaattacgttaggtactttattttctgataataaaaatttagctgtgccaacctatcaacgtggttatgcttggacaaatcaggagtgggaagatttttggaacgatttggttgaggtcttagatgagaatgaagatgatcatttcttagggcaagttgtaactaataagcttgatagccgtgactatgtggttgatgggcagcagcgagtgacgacgtcaacaatgtttttagccgtattacgagatagttttaatagtttggattcagaacgagcccgtatgcgtgcgcaagaccttcaaaagaagtatattggtcgccgaggaaactataactttacacaatctgaacaagttgctgaattttttagtcgattgattcaaaatgacgcgttctcttttagcgaggtaaaggggcaagctggccaagacagtgagcacaattttgtgaaagcttacgattatttgtacaagcgtgtgggtgcacgaataaaggattttaatacgattgacgatagggttgaatttttagaagatttgcaggatgcatttcttgatcacatgtttgttatgaagatttcaacaccagatgaagcgagtgcatttgttatctttgaaacgttgaatgctcgtggccgtgacttgaatagttccgaccttttgaaaaaccatctattccgcaaagctagtggcgatcctgacatacagcaccattgggaagaaatgatgactccgttagatttcaattctgatcgggctacgaagttcattcgtgcatactggaatggaacacatgaattcgttactgagaagaagttgtatcgtgctttgaatcgaagtgtggagactaagagcgacgcaacgcgattggttcagaagctttcagatttgtcagatgaatttgcttctatgctagacccaaagacccaaatttcgtttcataatgaaacattgattaataacttgtatgtacttaatcagttgggagcaaagactttttatccgctgattttagttatggttgaaaaagaatttgacgaagcagaaattgcacaagttttgtataagattatttcgtttacaatcagaaactttactattgggggtctagtagcaaataagtttgaaaaatcgtttgcaacaattgcgagaaagctaagcgatggcaaaatcagtactgttaaggatattaatgatttaatttcagaagaaatggttgataatcaacaatttgagaatgccctgaaatcagcttcgcttcctactgaaaaaacaactaaatatatattgtctgagctgtcatatcctgatgatgaaagtaaaatcctcttgactgatgtaaaagtcacctatattaatgaaaatgtggagaacaaggatcgtatcggtaataaattattgataacaaagaaagaggctaagtcgtttaaagatgcttcttctagaaagcaggaagttatagctaattcaaagtttgaagatactcgaaagtgggcgggtaaagtaaatgtaatgacgtcagaagagattgacaaacgacaggcttcttgggttcgatctgctttgcttatttgggctaagtaaaaacgatacaataaatagccgatttatgacaaataggctgggacagaattattttttgatcaaaaaataatttgtgattcaaagccagttaagctgaaataatgcatatacaaaaaagccgaaggaatcgtattttaacattcgtattccttcggcttttttgtcggtgtctgatttcgtgatgctcgcttgtatcaaggttttcagccgtttttttagaaaaatcatgctttatatatacatcttttgcattaacttctccatccgcaagataaagtctgcgtttaattacagttgtatccaattagtctaaccaaaatcaatttgatctaacatggtttcccgactcgcttggtctaagccaaggtaagttaacgtcatagcttcactagaatgattcagtaagtgcatgactaagccaatgttgtaatttgactgtgtatagacacgataagcgccggttttacgcatggtatgtgtgcctagatagtttatccctaatagatcaccaacgcgtgccatgaccttataaaactgcttctcagtgatgtgacggtctgggtgggcagttgaggggaataaccaatccgaattgatgttttcttggaccagccaatcatgatatttcagcaagtcttgttgcacgggctttaaatatagtgtatttgctttaccggtctttttatcatgaataaaggccgtgtgtttaacagagccatctggattatagacatcggatttctttaacgtcatcacatcactcacccgcagcagggtggctttgccaacttgaaagatggtgtagttacgtcgacctgcccgaaaactatcgagtaaggtgtcttgcaccatttttaagacgttagagtctttgattgggaggactatttgttgcaccatagtgaatttaccacctttcaaaggtcactttattgtttgttaaattagctaatatttgtatctttttatacaatgcatctttcgaaaaattaacatagacatgatatttactggaatctatagctttagttaattttgtaccttgtcctgagacgcgctctagggttcctattatttgtacagtattgggttcagtcgaatttattaaatccgttaatttagctatatctgacgacagaacaagtgtagatactaatttaataaagacgtctcggtaagagcttcctgtataatgctgtctaccaaataaaatcgaaatagtatcgttgtttggagtagggtccaccctatcaaattcggtatcatcactagcaaataagttaatatttgcgatatctatcaatacccgttcaactttcgataacaatgataaggcagaaaattggcttaatttatcaatatagctctgattaccttgggtattattatctagttcgatttctgctcgtttcattttttcaattattttgcgttctagcagatctaactgtgcttttgataaatggccatcttcacggccaaaaaatattaatttattccaccaaggcttattaatataatgttgctgcaaccgattaaaaatagcatttgatgcttgacctatatatcgtttatcagcacctaacaatatatagataccaggttttttagactcatcaatcaactgaatgctagttagatcatctttattcgcaatgaccacaaatgatggttcgtcatagaatattgaaatattatcattcccggactctcgattgataaatatgtgattgggcatgtgatcatcgacctcgttttttaagtactattatatcacctaacaaaaaaacaacccccattatctaaccggtagataatgggggctgttttaataggttttcacaggggcgatttatataattatagaccctatacaaacatattttgtaaaaagccttttttctgttctttcaacaaatctaacttacgttgatgaagagtgatagtgttgtctaactgtttgaaaaataacccaattttttgttgacgacttttgtctcgcactcttcattatttatcacgatgataaaaatcttttgtattaaagaagtcatttagaaccgtgttctcaccagtcattgtttcatgtaaacgaataccatcgacatttatccgcgcattacgataataatcatttgttaattgaccccatgatgtctgtgacgcatcaacattatcgaaaatactgaaaccgctactcttaagataagtatactttgcattatcatttgtataatttgtaaatgagccaatatctgctccaaatgggaaaatcaatactggtgttttaccaacaattggttgtacttccttttgccaaagtgcagtgtcctttttgatatcatcaacactggccgtagtcatatttatatgaccccaggaatgcgatgcaaactgccaaccttcctttttcatagcgttagcaacctttgtcgctttcttagcttcgcgatgtgtcttttttgtatcaccatattgactctttgatgaacgataacctagcgccccattataacccgtttcagcaatcacaccctttgagccaccgtatgagaaatctggatgctttttgatgaaggtatcaacaatcggtaccatgtcataatcaccaattttcttctgaccattattggtatattgatttttaacatcaccttgcttattgacgactaatttatctgcaaatccagaattcttcatatactcataatagttaacatcatcctgtgatataattaaaggcttcttgccttcaggtaatttgactggtttgaaagtcaccttcccttgtttatcaatcgaaatgatatctttaaagttaattaatacatagccattatcatataactgattcagcatcggcataaattcgtcgatggtcaccatataatctttgtatccctgtgcctgcttagatgagaaagctttaccaggatcaacaattagtgaatgataaaaaagatgtgaaatttttgtcggatcatcccacgtgaccaactttgactgttgcttattaatactcttttttagatgatcaactgttgttcctttgtgccccgataacactgattttgcttctttatattggtactgttgacttaatgattttgcctgctttactgtcttagttgtttgactatcagtttctgcagccataacatcatcatcaatattgccatataaccctaagcctgcccccaaaatcaacccaatgacgacaagactagttatcttggtttttatcacagctattcccccataatttttatgaatattaaacgacaagttagtgccattctatatcttattacctcaaaaataaaattattcgtattgttttataaatagtaaagatatcaaaaatgcgacataatcaaacaaaaaaagagtgattaaaatcactcccaaaaaaaatatttttaatgccacaatacctatttattgcgcatcatccttaaacttattatagtaatttgctcctgggaatacccagttagcacgaccgaatatcttgattgtcgctggaataataatcagacgaaccaagaaggcatcaaatagaaccccactggctaatgaaataccaattgacttaatcgttggatcttcaaccaaggcaaaacttccaaagacagcaatcataatcaaagcggctgtaataatgactggaccactctcttgcaatcctgttttaacagcccgatttgtatctccagtggcaatgtatgtctccctaatccgtgagaccatgaacacttcgtaatccatcgccagaccgaagacaattccaatcataatgactggcaaaaatgcaataattggtgatccttcactaatatggaaaacaccatcttgcataatcaatgtcgtcaatcctaatgatgcaatcaatgataaatgctcttatactaaaaaaatggactatttttattcagtccgtaaaatgaaagtataggagtatttttatgtcaattcgttattcacaagattttaaagattcactggatcatcagctttgacgattaattgttcttgagctgtttcttttaaagtttttgctgaattcgttatactgcaattgtaagcatatttaaaaaaatagttgaaatgggagggatttatatgttggaaagaaatttaacagttattggaagttacagtacgagagaagaagctttatccgtgatcgaacaactgcaaagagaaggctatagccgtgatgatatcattatttacaccaacaaagatgcagctacaaattttggttttgctggactgtcaggaatcgatgttaaaaccggcgtaaatggcgtcgaaacgactcacgaagatcgctcactatgggaaaaaatcaaagatgcattttctgctgatacgtacgaatacgattcaagtttaaatgaagaagctgaccatgcaaacaacgacccgctttaccaatatagagatgatatctcagctggaaaaattattatcaccgtcaataattataaaaacgacccaacacaagcaactgaaaatgttacaggcagacatgcagctggtgacactagcacaaataatttacatgcatcagatgctgcacgtgcaactgatctagatactgatactgatagtatccggcttaaagaagaacaattggatatcaataagcatgatgtgacgacgggtaaagtcgatatccataaaaatgttgtcaatgagacgaaaacagtcgacgtaccggttaaacgagaagaaatcgtgatcgaaagaaagcccggagatggtgcggctgcaactaccgatgtcaatgatacgctagaagacgacacgatcacgatcccaatcaaagaagaacagatcgatgtcaacaaacgcccggtcgttcgagaagaagttgacattcgtaaacaagaacacgaagatatgaaacaagtaagtgaaaacgtcggccgcgaagaactagatatcgatacgagtggtgatgcccacgtagaagacttacgcgataatgatcgcaacaagcatgaccggagctagtttctagctttgattttatcaaaccttttgaacaagaacttaaaaaagattactggcagccatcagaagatggctgtcagtaatcttttttggctctttgtgtgcgttcccgcaattaaaagccaaagaagccgaaaccaacgtcttcactttggcttcggcttcttttactgaatcaactaaaagaccacgtggtttccacgtctggttttactgctcttatactaaaaaaatggactatttgatagttatagaccctatatattcatagcccctttctgtttggtgttaaagtattagtcatcgatgtcatgcactatcttgtttagctccgttttgatgaaactgggaatattttctaaattgaaatgattatatatttctttatccttaagcatccttttttgtgccttatttaatttacactcattgttacccactacccaaattgccgcaagtgacaaagcacgcgaagtcttaggttggacgccacagtatgacaatatgaaagcaattattgaaactgcctggaattggcatttaaatcatcccaacggttatacagaccgcggttaatgatgaaggaacacgccagaaattctctggcgtgtttttttatggcctaatttggacatgcgtcattgtttttgttataatgaaaccactattgaggaggcactaacttatgcaagtattgattcttgttttaacttatctaatcgccgttgaacacatcggtatcatggggctagaaatgtttgccagtgctgaaacaaaggcgaaagcttttgacatgccgctggactttgtcaaactaccaaatgcccgcgtggcactggccaaccaaggcatttataacggaatgttgggcgccgtaattatcatggtcaacctgttattagccggccaaacgctcaagattgtcctcgccctattaatgctctacatcttcatcgttgccctttacgggacatttaccgccaccaagaaaattttcttcttacaaggcttacccgctttaatcacattattgttaatcttattcttctaaaaaagagctttaatcatgacaaatccaagaacgtcttcaaaaacatcggcgcttcattgaaaaatgtcgtcggtggcgaaatcaaagcctatactgaaatgatgactgaatcacgcgatgtagccatcgaccggcttcgccaaaatgcacttgaaatgggcgcagatgcggttgtcacgatgcgctttgattccggttcaatcggaacagatatgcaatcagttgccgcttatggcacggctgttaaatatatcgactaacaaaaaaagatgaacggttccctgatattcaggaaatcattcatcttttttaatttacttattaattctaatcaacaacttaagccgctggtgctgcgggttgtgcgctatttaaagtccacgtaatgttgctcgagaatgtatcaccagccgcaagttgaatacttggattggcacttaatgctaatttcccagcaacttgccatgttttcgacatcttatccgtcataatcggtgtttcagtaccattatcagataatcctacgttcgttggcaagccagtcatattaatggctgtgctgcttaattgtttgcctgtggttgatgccattttactcatcttcgctgtcaatttccaacctggcgttgctctaatatccgtgattttcaacccatcactgacctgatattgcttgtcctgagcagttgtaccaacataaatatcttttgataagacgttcccagatctaaagctaggcacttgatccaatgacaacttaccaactgctggttgcgcttgtaattcagcttcgttagaaacaatcgtaactttttttgaacttccacttgattcttccgttacgttagtcgttaatgttagctgtgctcgataactctttccagccgtagttgcagctgcagcatctttcatgaaagtactatctttactaaaggttagtggttgttccgtatttaagttcgctaaatttgtaatgtcacccttaagattagaaacaccactattagtagcgggggttattgtcttatcctcaccatctgtaaattgccattcataatgccaattactcgttgaaccagatgccttagctaggtctgacaaaccatcaactgaccaagtcccaccgagatccgccgctttcttgtaggctgctaacccaccaacataaaccgttttctctttagagacattccctgcagcaattttatatttagctggaatccctggtgtattcggatctttattcaattttccagtataatacaaatctggcttatacttttcaccctccacatcaatcgcttcgttaactttattcacttatttcgtgcgtttaatagtaaaatgattaagcagttggtacagttggtgttgttgatgaaagattccaattaattgttgttgtgaaactctcatctttagctaaatcggctgctggatttgctgctaatgttaacgtagctgcttccatcttgaaattatcgacaccatgtttcccgttacctttaaccacttcaacggcaggagaatcgtccttaacagcacctgttaaagtttcaccaagtgaaccagtagaatctaaattcaatattgcgcctgttagtttattagcatcatctgtgaattgagccatgtcagctgtcaacgaccagtcagatttgcctaaacgtatatcagcaatttctaaagcgccagctgttttagcaactttaccagtaaaaccagcataaatcgcactagcttcaattgtcccaaagctgaaacttggtactgattttaatactaatgtcccattttcaggatctgttgggtttgttggatccttagcaacaacactaaagtcggcttttgatgtttgcggagcaactgcgtcagctgatactgaccccactgtcattgctgttggtgctaccattgttgctaatgctgaaaataattttgtcttcattgataattcctccaaattattattaattacatttaatatagtagcacgcaattcaattgccggataacaaaaaatagataccatacggtatctatttttacccttcactaattattcgttaaaccgattccaatcctgtcctagcagttatttccccattaccattcttctagtgtaaacagcttgcccggaatgcatgaccgcatcatccacgattgagactaagcgtgcttcacgggtaactgccggtgtccaattttcatcaattatctctaataaagactcgtcagtaacttcagccaggtaatcaagcgtcaattgcaatgcgtctgctaagtaaccaattaataatgctttatcggtgataatcactttggctgcttcttctggtgaatgcgaccaatcttgcgtttcatcgggtagatctaatgcaaatttttgtgaccaacctgcacgtatccacaatggttgtatccctttcaaatccgcaatctgataatccatttcacgggcagtatgccatactaaccaggtcaccgatttaattagtggctgcggcattgtattggcctcagccactgtcatttgttccaatgtatcgagtaatcgttcttgagcgcgttcgaccgttgcacttaatagttgcgttgcatgcatcttatcatcctccatatctaaaagttaaccccattgtatcattaaaccactactaggcttttttttatgaatttaccaaaccattacgaagctttacactttattttcactagaacaacaaacactttacattatttgtttatgcttaaccttgtaaagaataaaaaatcgttttacaaggagcaatcaatatgcgcatgagccaaacaatcatcccttacgtggcaacaacaactttattacttttggcagtcggctgtaccccacaaaaaaatgctaaacaatcgacagctcatcaatccacccttgtccctaaacaaaacatgagtcgccacattcaattagccggtgcgattaatactcgtgatctaggtggaattgtcacgaaaacaggtgccaaaattaaagccaatcggttaattcgttctggtgaattagctggtttaacaacgaaggataaacagaagttaaccgttggaaaacaattaaataacatcgttgatttacggactagtagcgaagttgcggctaaacccgatcccgctttaagcaacgtccactacaatcactatgatgtcaccaagtctttagggacttcggcaagtcaagctgactttttcaagaatctcgataaggttgatggtgaagttttcatgattgatattaaccaaaaattggttactgatcccgcagcacgcacgaactataaacagttctttaatgtcttattgaataataaaagtggtgcgacactttggcattgtacagccggtaaagatcgtgccggattcggtactatgttagtcctcagtgccctcggggttgatcaaaagagcatcatggacgactacctcgcctctaataaatatcgccgcgccgaaaatgaaaagacaattgaacaaattaaggtggcaactcacaataaccccaaagccgttaaaacgatcactgcaatgatggccgtccgtaaaccctatctacaggtcgcatatgacacaatgaacaaagaatatggtggcgttaatggttatttgaaacacgggctgggtttaactaaggcggatctcaaccaattaaaaacgatgtatcttaccaagagttaatgcttcatcaggtagattcactattctcgtctctccatttttttggtatactgctccttagaatcaatcagttaaaggagcctcatcatgtcacctgctcaacatctcattttattattgatcgtgatcattgctgcaatcggcgtcttaagttcatcagtcatcttattcatcgcccaacaaaagaaaaatgaccaacttaagaagaaatcgaatgtgctcttttgggtcagcatcctcgtgatgatgatctttctgaaactaatcgatatgcttcaataaacaccaaaaagcatgccagtcaaatttgactagcatgctttttttgcaatctatcttctaaaaaaccacccttaattctttgctaaattacaaaacttggtctaagcaattttattgttccccacctttgaggatgttatcttaactactaaaggaggtgtcactatgaaaaccttagacaatatcgcgcttactttattaatcgttggtggtttgaactggctacttgtcggtctattcaaattcgacctagtcgctatgttatttggcggtcaagcagctattatttcgcgcatcgtatatgtccttgttggacttagcgcattatattgcattaagttatttgcacccatcaacagcgcgcagcatgaatagctttctggagcggctttttatagggaccaaacatcctgctcgtctcaatcgctatccattaacgtgttggtaaaactgttatttcttttcaataacgcaaaaaagcgtgctagtcagcctcgactagcacgcttttatttttttatttacctttggtatcttcatcattcatcttcaaaatggacatgaacgcctctaatagacacgtttactatactttatcagtccatggactagctgttttaacaagagctttgttaagttcatcaatattttcgaatccagtagtacgcaaccattcacgtgctgctttttcaccttctttgatgtaaggttccacagatcctgcccaagtagcacgtccacaaagcacaccattaaacttggcacctgagtcgtgagcaaattgcaatgtttcttggaacaatttagcagatacacctgcacttaggtagatgtatggaaggttagtcgcttcttcttgtgctttaaagaagtcagcagcttcagctttactgtaaaccacttcaccatcagcaaaaccttcgacatatttaacgttaactggtacttctactttaagaacatcaatgttaaagcgtggatcagagaaaactttcatcgcttcaatgactttgcgaggtttcacttttgcatattcaacagaacctgcatctgagatttcttcatcataagcaaggatttccaagaagaaaggaatatcttcagcgacacattcagaaccaacacgttcaatataagcttgtttttgttggttaagttcatctgagctgtctacatcatagtaaagcaagaacttaacggcatcagcgccttgctctttgatacgttttgcagaccaaacatccaagcagtcaggcaaacgttttgtacttgatgtatcataacctgttttttcataggcaagaagaagacctgcttctttatccaatgcttttgttgctggaagtccatactcagggtcaagcaacattgaagaagcgtattttgtaagttcatcagcaaccaaaacctttagttcttccatttgagctacagttggttctgtatcttgatactgtgccatcaaacgtttcaaagcaccacgttggtcaaatgccaaagctgagataacaccgtttttatctgaaagtttttccaaagatttgcgtttctgttctgtaagtaccatttttatacctcttttactccaatttgtgagtttagtgtttcgtaattagtcatattcacatgccctgtcattgtttcttgagcatttaacatacccaatgtcatcgcatgttttaataagtcagcgtcactttttttactatttaaagctgatgcaataccagctaccgttgagtcccctgatccgactggattaacaactgggatatcaggaatatctaccttatagaaaacatcaccatgttttgcaaaggcaccgtttcgacctaatgagaccactatccattcgataccactaaaaagtgactctttaagaacgtctttgagttcttcaatatcttttgttacttcttttccaagcaactgtgaaagttcctcattattaggtttgatggcagtaggtttagccgacgattttagaactgtttcaagaggtgcacctgaacaatccaaaacgactgctactccttcatccgaagcaagttggataagtttttcataataatcgttgggaagtcctgaaggcaaacttcctgaaattgtcacaacttctgattgtttaataagattgctatagtggtcaagaaagccttctgcttcttcatgagaaattgttggtccttgttccaaaatttctgtttggttaccctcgtgtaagatagcaatacagtttctagtgtttcctgagattttataaaaagctggactaacaggagattgttctaattcgctttcaataaattcaccaattttaccacctaagaaacctgtagcagtaactttatcaccagattcatacaagactctagtaacatttaagccttttccaccagctgtcttactaacatctttcaccctattcactgtatcaattttcaatgtttctagaggataagatatgtctactgaaggatttagtgtgactgtcagaatcattgggtataccttaatcgtggtactcaccccggtcccatttttcaaggaattctgtaaagaaatcctcatctgcttgatgtgcattatgtgtttcaacgtgttcgatttttgcaatcaattttttattttcttctgttggtttgtactcagcttcaatgaaagcttcaatgatgtcattcataagaagaccaccagtaatcattccaccaaaaccgataacattcgcattaagttcttccttagcatatagagctgacgtcatatcacgaaccaacgctgagcgaacacctggaactttattgactgcattgttaatgccgacacctgtaccacagatacatactcccaagtctgcttgaccacttactactgcttcaccgacttttttaccatagatagggtagtgagtacgtacgtggtcatatgtcccgaaatcaaggacctcatgtccttttgatttcaagaattctgatactgccatttttacatctgtgacaatgtggtcacatccaattgcgattctcattccttaactccctttcttaacacatcttgttaagcatatctactcggatttgatgacgtccgccatcatatttaccattgacgaaacctttagcgatgtttttagcaagctcatcaccgacgatttcagcgccaaccgtaatcattcgtgaattgttatgtccacgtgtcatataagctgagcgttcatctgaaacttctgctgcaaccatacctttaattttagttgctaccatgaatggaccagctccataagcatcaattacaatacctaagttttgctcatctttatttacttcagaggcaactgccaaggtaacatcaacaaaatcttgtccgtccttagtcacatcaattacctcaaaaccttcttctacaagaaaatttttcacaacatcttttaatctcgtacctttgagatctgcaccaacaacaatagccatttagactacctcctaaattttaaaaagaaatgctacgtagaagtagaaaatattttgaaaaatgttcgaaataacgttttcatcatctctttgtttataaaatatcaaacattcaaacaaaaagcaacgcttttttgtttgttttttgtttatcttttgttttttttaaatagataacaccgttaaattattgttcatttaatccatcacaaaatggacgtgaaatgtctattcaagtattacaaaagtcttttaattcctataatttactgattaagaggtcctgctttattttcgtcttatacaaaatctgacctaagctaatatacgtcaatcctctgttcttatttcatcatctaacgtttgtttttgtttgaaattgtttgttttacattgaaagcattgtcttttatgatacaattaaaagagaattatctttggaaaaaaattactttatgaaagaagagtcttcatatgaacaaaaaacgacgattagaaaaaattttagatatgttaaagattgatgggaccataaccataaaagaaataatagatgaactagatatttccgatatgacagcccgtagagaccttgatgctctagaagctgatggacttttaacacgtactcatggtggtgcacaattgctttcctctaaaaagccacttgaaaagacacatatcgagaagaaaagtctaaatacaaaagaaaaaattgacattgctaaaaaagcctgctctttaatcaaagatggcgatactatttttattggacccggaactacagttgaacaactggcattagaattgaaaggtcgtaaaggttataaaattcgtatcattacaaatagtctccctgtgttcttgattctaaatgatagcgaaaccattgatttattgcttcttggcggtgaatatagagaaataactggagcttttgtaggttcaatggcttcgacaaatttaaaagcaatgagatttgccaaagcttttgttagtgcaaatgctgttacccataattctattgctacatatagtgacaaggaaggtgtgattcaacaacttgccctaaacaatgctgtagaaaaattcttattagtagacagtactaaattcgatcgatacgatttctttaacttctataatctagatcaactcgataccatcattacagataaccagattagccatcaacacttagaggaatttagccagtacactactattttaaaagcggactagaattatgacttataaaaatattggactactcttaaataatttggattgaagtcaatatttgagacagatttcaagagacattcagaaccgcgtttaccttccacagttcaaataagttattaatcgcgattaataacttatttgaaccctgaaaagcattaaatcaggcggccatttggctcgtaagtgttgcaatttcagccgaaaggttcaaccttttttgtagtaattaaataataagttgggagaaatcagcatgattcaaaccgtaacagaacagaacatcgcaagctttgttcaaacacaaccgttagtgattttagacttttgggcggattggtgtgcaccttgtcggattatgacaccgatgattactgaactacatgaacaattagctgatcagtttggcttaggaaccgttgatgtagaggatcaagcagcgttagctgaacaatatgcgattcaatccgttccaaccctattaatcttcaaaaatggtcaggcgacagaaaaggtaactggcgcttttccaaaagagaagttaaaaagatacttagataagaaaatcgctgaaatgtaatcagcgcattaatagtagcccgcaactttcattggagagttgcgggtcttttttgataagtagaaataaaataacccccttagctattgtctaagggggagatgattattgacgaaccatgtggataacacgttgataaaggattaatgcgccaatctcacaaagtaaaatcaaaacagctaatggaagataggtataactgcccatcacgccaactaatggggaaagaaaaatgccgaaaacatacataccaagtccaagcactgaagaagcaatccctgcatgttgtccttggcgttgtaaggccagtgaggtgacaacggcattaattagaccaagtgttgcgaccactaggaataaaccaattaaagctaaccagagacgattagagccaaagccactaattaagacgcagatggcaccgattaaaccaccaattaagccgatttttaattgttgtaattcatcaaaccaatggattaaaatggtggacatttcagccattaagataatcccaatcccattgattccgtagattagactgaaagttgatttagaaagactaaagacattttgaagcatgaaactggaacctgaaatataacagaacattgccccataaacgaggccttgaattaaaacaaataggatgaatgggcgatctttaaaaatggcttgaataccaaggcgcgattgttgtgccgattgcgcgcttgtggatactgtgtgtgtttctttgaatcccaaaatgatgcctaacaatagaagaaggccaacaatccctaaaaagccgaaaatgccttcccaagaggtgaaacggagcaaagcacttcctattaatggtgaaatgatggggaagataccgttgattgccatgagtaaggcaatgaattttgtcaattgtttaccgtcaaataaatctttagcgactgctcgagtaatgacctgtcctgcagagctcgctaacccttgaataaaccgtaaaaggaagaatagccaaatattgtgggtgactaacgataatagacacgctgtaaaagcaagggcggttccgattacgagtggctttttacggccaacacgatcgctccaggcacccatgaagatggggccaatcgcaagtccagccaaacacatggttagactcagttgaatcatggaagcagatgaatgaaaatcagcttccataatcggaaatgctggtagatacatatccactagtaggggtccataagcactcagtgaaccaagtaaaacagataaccatagtgttcttttttttgttaaaaccatgttaataaaccctcctaaataaaaaagtgtaaaaaaatagcccgttgaaaacgtagctagcgccgaacgaatttaattaattactattcatgttgcttcttagttacactaacataagaagtcgggtttgtggcgatatatgagcaatttttaatatgtaaatggtttctatttcagtttaaacaagttatgatggagataatgaaaaaagttgtcgaatgaggttttgccatgaaaattgcccaaaaaaataaaatattagaaacctgcctaattgcgggacggattatgattgaaagtggttctgaaatgtaccgggttgaagatacaatgaaccggattgcttataatgcaggcattcaaaagagtgttgtgtttacgacaccgaccggtttatttatcggaattgaaaatcaaccttatgtgcaactaggcgctgttgcggtgcggacgattaaccttgaaaaagttgaaaatgtgaatactgcttcacggcaatttgcgactaaggaaattacgttggatcagttaatgttacagttaaaacaaattgatcaggatacagctcattttccgttgtggttacaaattacagctgcagcagtcatttcagcgtttttgatgattattttttctggtgaatatgattggttagatatcataccgtcagcggtagccggtgctttaggctatgccgcctttgcggcggtcaatcgggtcacaacgattcgctttatcggtgaatttttaagtgcgacagtgattgggatagtcgcctatctattaactaggtggcacttaggagtcgatatcgataatattatcatcggggctgtaatgccattggtacctggtgtagcgattaccaactcgattcgagatttgctagcagggcatttattatctggtatggcacgtgggatggaggccatcctgagtgcctttgcaattggaacagggattgcgctcgtatttagattctttatgtaaagagaggttcatcagatgccatattgggttcagtttattattcaagcgttatttagttatatttcaacggttgcgtttggaatttgtattaatttaccaagacgcgcattattatggtgtggctttgccggtatggcagggtggcaggtctattggatgctctttaactttggtagcgggcggatgcttgctaatttgttgggtgcgttagctgttggaatttgtggcaatattatggcccgttataagcggatgccggtgattatctttaatattccagggttagtaccattagtgcccggtggaactgcgtaccgtgcgattcggaacctcgtgctaggcaacttaaatgaagcttcgacacaaggtgtttcagtgatcatgattgctggtgcgattgccgttggctttatgttagcacaaattttagccgatataacacgcaaacgagcgattacgccgaaatgggtatcgcgtcactaaaaagtatgctataataagtctatgcgatgagtcgagtaagtctcggtaggcaactattctgcgaaggcagctaggagacccaaagatacaggataccacggttattcatttaaccacttgccgtattgcaagggtgttttcgcccgctgtgttgtggagcacaaggtgtttattcttcggaatactgtaaaaaaagccccttccgtcaggaaggggcttttttttgtgcgttcattttcttgcatgacagcgttactgatggtgcgatggtcgactaattcaccaatccgttttagatgtttgagatgtgcatcgtagtgttccgaaaaaacgggcgcgtataaaacatttaataggaagatgatggaggtattaatggtaaagttgccgattttcgagtagagtttttcgcgggttgtaatcggtaaaaagcaagtgcattcttgcgaaagtcgattttcaccgatactggtaatcgcaatcgtcgggatgttgcgggcgcgtaaaatagtgttaagtgctagtaagttgggattctcgccagaataggaaattaaaatcgcacaagcatccggactaagattataggcatcgtagttttcctcgccacgaaccgcagatagcgtaacgtttttttggatacgattcattttgagggcaaaatcttgcgcgatgagtaagtttgagttttgggagaagatttgaatatgatttgccttgaggagcaatgatttagcttgactcagatggtcgtggtcgagtaaaaagaagatatcatcaatcgtcattttgtccaagaccgccattttcttacaaatagtcatcaaactatccgtactcgaaaagggcagattgggatcgatacgcgtaaaatgtttattgaggtagcgccactcttctagatagtgtttcttaaaagatttccaaccgtcaaaatggagttttttggcaatgcggaccagagtggacggttgcgtataggtttgagcagcaatttcttggatggaaagctgatcgagtgcttctggagccgttaacaagtaatccacaaccacggtttcagcgggggaaaacgcgaatgtctctagtttttctttaattaacatgtaaccgcctccttttacaaaagattagcgatataattaaaataatattattttatgctgtgttatccgcaattctaaatctggatcatagtgatatttgatagctttgtagcagtatgtaaataaaattattattctgataaaagcaagcaacgattgacaatcctgatcgttatttttagaatcatggcgtttttatgttacgatgatcctagaaaaagtaaagttatggaggtaattagatgagtgatttggatcagacaaacagctatcgatacgtcattgttggtggcggagtggttgctggctatgccatcaagggaattcgacaggaagattcagagggtgagatcttaattatttcgcaagaggcggatgtcccatatgaacgaccggcactgagtaaaaaactatggctagatgatgaatttactgaagagaacattcagattggtgctgaaaattatcccaatgtgacttttaagttcaagacaacggttacggctattaatcggcaagataaggtcattacattggccgatagtgagcaaatcaagtatgaacagctattgctagcaactggcggagaacctagacaaatccagggaccttctgatccacatgtgctagtctttagacagtggtcagattatcgcaagttacgtaaatttagtggtccgaacaagcgagttgtgatcattggtggtggatatgttggtacagagctcgcatcgtcactgacccaaaatgagactgaagttacgatgatttttccagaaaaagcgctgggtgagggtaaatttcctgagtctattcggactgagtatgaagccacgttcaaacgcaatggtgtcacactgatgagtggtcagtttgtccaatcatatcaacgccaaggtgaccacttgactctattgacaaaggatggtccggtgatcgcagccgatacgatcattgttgggttaggcgttacgccgcggattagtttagctgaagacagttgtttggatttagctgatggtggtgtgaaagttaatgagtatctcaatactagtgacccagccatctggtctgctggagatattgcctcttatccagatcacatcttgggtcggcaacggattgagcacgtggaccatgcccgactttctggtgaattagttggccgtaatatggcgggtgctcacatgagctatcagcataccccatacttctattccatgatttttgatatttcctggcaagcaatcggtaatattgatcctaaattgcaattgatttttgatcggcgaacgcatggatcgcttgtctatttcatagataccgataagttagttggtgttttagtttggaatgttaaggtgaatcttgatgatgttcgcgcattgcttgcgaacgctccagctacagatgatctggtgggctccattcgagagaagaaggcttagtatctggatgagataccggtgaatcattgcgtcatcacgaatgtactttagaacaaaatggccatcattaacgatggctcagtagcaaataaaaactagccttgagtcattttaaagtgcatgaagtgcaacacaaaagttagacaaaagtaaatattattatgccgctaaggtatgttctcgatattcacacggggacataccctttgtttttgatgagattcgtcggtaattgaaccaattaacatattctaaagaaactgcttttaattcggctaagcctttacacggtgggaatccagccaaacattcggtcttataaaggtgaaaaaagctttcaatcggggcattatcatgacaatttcccttgcgggacatactttggataaattcatgttcagataatttttttgtataggaatctagttggtaatgccatccttgatcggaatgagtgatgggttgaacattacttggtaacttattgattaattcatctgtaagtgattgctttgggctttttaatttctgttcggattaattatagaatttgccccagtgcataaattttcctttcttgacatatatcaattttaataagtttagaatagcatataatggacttataatgaagaattggaggaatcattcatgactaaaaaatacgttgctaacatcgtaccactaaacgcagaaggtattggaacggcaccccatggaactgccacctttgttgaagacggtgaccaattacacgtggcgattgaaatgtttgatacacctgcaaatacgcaacactgggaacatttccacggttttccagatggtaaggcggcccaaattgccacgatggcgcaggatgccaatcatgacggatttgtcgacttgccagaaactgaaccagtctcagggacaacgatggtgccatttgacaacgccccacatcacatggacgtgccaaatgataactacccagtcgctgacgcccaaggccactttgcctacgaaatcgatgtgccattagctgatttgcaagcgaagttcaaagaagtctttggtaccgatgacttggaactcgacaaacgggtcatctacattcacggcgtaccacaagacttggctttaccagccaccgttgctggtgaagttggcgcctacgatgcacacgtcaccttaccaattgcggttgggaagattgaagtcgcagactaacctaaaatttgaagtaagctaaaacataacgaccggatgagcctatcacatgacaggttcatccggtcgttatgtttatttctttagactatcgacggaagccttgaaaacgcgaaatcgattgacgattatggttccgactggcgaagcacgtccgttaattgttgccgaaaaattggcgtccagatattccgataacctaatcgggttggatgagcgtcgtcgaccattgctagtggttgggcgcgattttcagctttgaccactggatcttgccagaggtcaataatcgtgaagtgccactttttttgtaagactttcaattgctgcactaatttaccataattcgcatcgtattttcgcacacaagtgaagaacacgattggcaccgcccaatgctgttgaacataggccacgattgtttcaatcgctccgagcgtcgtcgtttcgtcaaagccgtggcgctgttgtgcacccgtaacttgccccatagccttgtcatgccgcccatcattggttgaaagttggcagacaaaagcgtccaatggttgggtcactggaatccgatgatagagccgctgcacatagctatctggtgcgttacctgctaaagtgctgccactcaccgcttccttgatggcaatcacgccatccgtcgcgacgagataatcgacgaacaaatcttccagtgcacccgcaccggccgtaattgacgatcccagaaatgcaatccgccgacccatcaatggtgacttgggattcaatgtttgatggctaggggcgtaactataattatagaccctatatattcatagcccctttctgtttggtgttaaagtattagtcatcgatgtcatgcactatcttgtttagctccattttgatggaactgggaatattttctaaattgaaatgattatatatttctttatccttaagcatccttttttgtgccttatttaatttacactcattgttacccactaccccaaactttgttctttgaaaactggataataagtaatatattagttttaaaagccgagaaaacattgcgttttaaagagttttttaatagaaatatgaattagttcatatcgctaaactcaaataataaccctttaccgtaggtaaagttaggttaagttataaagggcgcacggtggatgccttggcactaggagccgatgaaggacggtactaacaccgatatgcttcggggagctgtaagtaagctttgatccggagatttccgaatgggggaacccaatacctttagtcgggtattatcattaagtgaatacatagcttaatgaaggtagacgcggggaactgaaacatctaagtacctgcaggaagagaaagaaaaatcgattccctaagtagcggcgagcgaacggggaagagcccaaaccaagaagcttgcttcttggggttgtaggacagaacattggagttaccaagttaagttgtaatcgaatcagctgggaagctgagtcaaagagtgtgataaccacgtagattaaacaacttaacctccgttctggatcctgagtacggcggaacacgtgaaattccgtcggaatccgggaggaccatctcccaaggctaaatactccctagtgaccgatagtgaaccagtaccgtgagggaaaggtgaaaagcaccccggaaggggagtgaaatagatcctgaaaccgtgtgcctacaattagtcaaagctcgttaatgagtgatggcgtgccttttgtagaatgaaccggcgagttacgtttatatgcgaggttaaagtgaaaagctggagccgtagcgaaagcgagtctgaaatgggcgagtgagtatatagatgtagacccgaaaccaagtgacctacccatgtccaggttgaaggtgtggtaaaacacactggaggaccgaacccacgtcagttgaaaatggcggggatgaggtgtgggtagcggtgaaattccaatcgaacttggagatagctggttctctccgaaatagctttagggctagcctcggaatattggatcatggaggtagagcactgtttggactaggggcccgtcatgggttactgaattcagataaactccgaataccattgatttagttccgggagtcagactgcgagtgataagatccgtagtcgaaagggaaacagcccagatcaccagttaaggtcccaaaatttatgttaagtggaaaaggatgtggcggtgcacagacaactaggatgttggctcagaagcagccaccatttaaagagtgcgtaatagctcactagtcgagtgccgctgcgccgaaaatgtaccggggctaaacataataccgaaactgtgggtggacacgtaagtgtccgcggtaggagagcgttctaagggcgatgaagctagatcgtaaggactagtggagcgcttagaagtgagaatgccggcatgagtagcgaaagatcagtgagaatctgatccaccgtatgactaaggtttcctggggaaggctcgtcctcccagggttagtcgggacctaaggcgaggccgaaaggcgtagtcgatggccaacaggttgagattcctgtactagtttattttgtttgaacgatggagggacgcaggaagctaaggaatgcacacgactggaaatgtgtgtctaagcaacaagtcttgagttgagtgaaatgcttgattctttaaggacaagttgtgatggggagcgaaattaagtagcgaagttcctgatgttacactgccaagaaaagcttctagtgagaaataaactacccgtaccgtaaaccgacacaggtggtcgaggagaatatcctaaggtgagcgagtgaactctcgttaaggaactcggcaaaatgaccccgtaacttcgggagaaggggtgctgaccgtcaggtcagccgcagtgaataggcccaaacaactgtttatcaaaaacacaggtctctgcaaaatcgaaagatgacgtataggggctgacgcctgcccggtgctggaaggttaagaggatgagttagcgtaagcgaagcccagaattgaagccccagtaaacggcggccgtaactataacggtcctaaggtagcgaaattccttgtcgggtaagttccgacccgcacgaaaggcgtaatgatttgggcactgtctcaacgagagactcggtgaaattataatacccgtgaagatgcgggttacccgcgacaggacggaaagaccccatggagctttactgtagcttgatattgagtgtttgtacagtttgtacaggataggtaggagccgtagaaatcggaacgctagtttcgatggaggcgttggtgggatactaccctaactgtatgaccactctaacccgcgccacttagcgtggcgggagacagtgtcaggtgggcagtttgactggggcggtcgcctcctaaagtgtaacggaggcgctcaaaggttctctcagaatggttggaaatcattcgtagagtgtaaaggtataagagagcttgactgtgagattgacaaatcgagcagggacgaaagtcggacttagtgatccggtggttccgtatggaagggccatcgctcaacggataaaagctaccctggggataacaggcttatctcccccaagagtccacatcgacggggaggtttggcacctcgatgtcggctcatcgcatcctggggctgtagtcggtcccaagggttgggctgttcgcccattaaagcggtacgcgagctgggttcagaacgtcgtgagacagttcggtccctatccgtcgcgggcgcaggaaatttgagaggagctgtccttagtacgagaggaccgggatggacatacctctggtgtaccagttgtgccgccaggcgcatcgctgggtagctatgtatggacgggataaacgctgaaagcatctaagtgtgaagcccccctcgagatgagatttcccattcctttatggaagtaagacccctgaaagatgatcaggtagataggctaggagtggaagtacagcgatgtatggagcggactagtactaatcggtcgaggacttaaccaaaggtgcaatgttaggcttttgaaatgaaatattacttattatgcagttttgagagaacgaagttcttctcagtgcgcaagcacaaaatagtgtggtggcgatagcaagaaggatacacctgttcccatgtcgaacacagaagttaagcttcttagcgccgatagtagttggtgggaaactacctgcgaggataggacgttgccgcgcctacgtaatcgccaatatcagcgaatgcttgtttagcgtactctttagcgatatcatcagctgtaacgaataggtcgttagcaatctcgttacgcagcttatcaatttgctcacgcacactagcatttactagcaaccttgggccatttacattagcggtcttataatcaacgtcataagcttgcatataagcccatgtggcattgaatcgttgcagatagtacaagcagaacattttctgttgatcgtttaacccatcattagcagataattccttcactattttgggtgcaaccttttcaactttgtgtgcaccctttttgcttttggggtgcaccgcttttttatttggcccacgttcccatccattacgctgtttccatgatttcacggtattaatcgacacatcatatttatcagcgatgtctttgtacttcatcccagataaatagtcttcctttgcatcatttcttgattcatcatgcattacatagcaccgccctccttcttataattgtttttctccaataaaatacgccgctcattatctgaacgacgtttctcatctatcttcttctgtttaagccacttctctaaacgggcatctgctgccgtccattcaggtgtttcgtagccgtactttgaatgtattagtttcacaatgcctatcactcctttaattttatgtacaaaaaaagacagcctaagctgtctcaagataaactcttttaaaattgtacgcctaatgaacctaagccagtcgcattccatttgtatccctcggagcgagcaatccgcatcaattttcggattcgttcagcgttttcattacccaataagttcttaccattcatggcccaaattgtaattccatttacggttttagctgctaccacttgagctggcatatcttctgtagataaatgttttgctgcaattaaaagaatatccttaatatgctgatcaatttctttgtgggccaaatcattatacatttcatcaattatttcgaaaacttgctcattaatagtctttgacattatatcaccttccgttaaccagaatataccacaacttcatgtttatgtcgctacttccctaatgattgtaattgcatttcactttattaaaaaagttttcaaatatctctttattgattttcgtgatgcatcatcacatcaattacacgttgtatttctactaatttaacagttggcgaataatcagagtctagtatgatttgtactagttcaaaaaaagatttatccatgtatcctcctaactaaaaaggacgtcgtattgacatccttcattaccttaagcagttgttgcaactggtccttcttctgctttcttctctttatctttcttctgtttccgaattttatcctttgcgcgcttataaacatctttgggactaggaagcccaaatacataaactaccatgatatcccttctttcttactttaattgtagactcaatcttacagtactacaaatattcgggattaaaaaagacagcctaggctgccttgataatattaatagattaatttatatacctctttgcccgaatctgttaaagtttcttgtactgcatttttaccgccaaacgtgccagacgccgtgaaacatagtccatttacttctaactccttgattgctagtcctaatgatgttattgaaatgtcattaaatatttcagtttttaataatccttgtgcaatatactcactgttatcaccgttcattattcctccaacagtgatgcttgctttattgggagctttcataatcggccatctattagctttctgcaatactaagagtgcctgtggtgatagtttggcaatcatagacaacacaactctcttatttgaaaagtgttcttttaaatcactatcattacttatattccttagaacgttggctaaaacatttaaggtatcatcatctgccggtgaatcattaagtatttctattaattttgaatacaatgtcagaccatagggatccgtaattaagtcaacaatacattgtaacgctttatcgtggtcgtctgatttttgtacataagaagcaacgaccaaagattttttcatatcagatatgttttggcctagttcatcgccagtttcaatcacatcaaaaataagactccctaaagacccatttaatatatcaacaaccaattctcgacctttagattttcctgtatcgattgcagcctctgcatactcatcagctgttaacctctgttgctctattctttgcttaagcgtttttttatcagcctttaaaattgattctggattattgatcatttctaacaaactttctctatccataattttcaccctccaataaatctataatacaaaaccccagccataaaggctagggctattggaggtgaagtatgtgccattactggcaatatcgcaggtgtggatttgcaccacacaattgccgttttaaggcgtaaagacgctttacctattccgccactgcgataataccctagtcgggacttaaacccgaatcgtgttcacatcacgttaatgtgccgctctaatcttaagctactaggaataatggttaggtccgcgatcatccacggcaacaacgtgctaaccccacgcttccagcaattagaattgaagtcgattaacctaacaaagtttgattaacgctaattgccgggtataacagatcgtatttttggcaacagcgcgaccaccgttttccgccggtgattactggtcacagtttaagcgcgctttactaataatccataatactaatttatcacggaaatccggctaataaccacagacaatccgcacaaaaaccgcactttttatttcttgaactcgtgcaagtcttcaatcatgaatgcatctgcaaattgcaggcatgcccgattcttataatatctgaatcgagtttcaccatacccgctttcaagctgagctgctgttacagtgttttcttttacatagatactccatagaatcttcctaatttgttcttgcaatttgggagtcgaaaacaaatggatttcattcaagattaaaatgagttatattgtctttaaatataataaggattggtgatgatcatgaagattgttgtgattggctccgttgcagcggggacgagtgtggcagcaaaggcgcggcgaaatagtgaagttgatgagattgtcgtttatgaaaaaggtcaggatatctcttattcggtttgtggcatgccttattacgtagggggtgaggttgaagacctagagacgttaattccgcgcgatgcggcgtggttcaaaaaacgcttcaacgttgacattatgacgggtatcgaagtgatttcaatcgatgaaaaccaacaagcgctggtcttgaaaaactttgagacgggcgagttgtttgaagattattatgaccgcctagttttagcgacgggggccacgccacgcattattgcaccgttcgatgaagcctaccaaaacgtcttcacgatgcataacatggtagatacacgcgcaatcgacgcgtatttacagcaccattcagttcaaaatgtgacgatttttgggaccggttatgttgggcttgaaatgatggaacaatttcaaaaacgtggcttggacgtgacgttagttcaacgaagcgcgcaaattatgacccattttgatggtgatatggcctatcgtgctgaacaagttattcgtgctaacggggtgcatgtgttaaagagtgtaaccgcaaaacaagtgactgcgcaggatggtgtggtatcggcggtagaattgagtaatcagacgaccattcaaacggatttggtcctactagcacttggcgttgaaccacaaacgcagttggtcgaccatatgaagatagctaagggaccttcaggggcgttgaaggtcgaccaacaaatgttgacgactgtaccgaatatttacgcggtcggcgatgttgttgagagtttctccgtaattgatggctcaccactgtatcgaccaatgggttcgactgccaataaaatgggacgaattgccggcaattcattgactggcggtggcttaacgcaccgcgggattcttggaacggggattgttcggttgttcgatacaacgattgcacagactgggtttactgaagcagtcgcgcgagctaaggactatgatgtggaagtactctacaacattaaaccagggcatgcagattacttaaatggaaccgaaaacgtcattaaagccattgctggccgtcaaacgggaaaattattaggtgtacaaatcattggtaaagatggggttgataagcggattgacgttttcgtgactgccatcacattgggtgcgaaggtggccgatttattccatctcgatctagcttatcaaccactctatgcaaccactaaggatccagtgctctatacgggaatggcgctcgataatgcattgcatgggcggccgctcttgcctccagctgaattggagcaacgcttggctgaaggtgaacgcttccagattttggacgtacgttcgaagcaaaaatatgcggacgagcatgttgaacatgccattaacatgccgcttgctgaaattcgtgatcggttcacggaattagatatggatattccaactgtcacctattgcaataaaggggttacggctaatgctgctcagaatttacttctgaacctcggttttaaatccgtgtataacttgagtgggggcttcaaaaattatcaggtagtcaaagcctacttgaatgataaataatataaaaataccgctgacaattcgctgtcagtggtatttttttgcgttgttatagatttttggtgaaaaattgagttaattctgaaaaaggaataagcgcgatacgatcatataaatcgacatgcccagctgcttttacggttaataactgttttgattcgttagcactggcaaaggcggcttcactgaaatgtcgtgaccatgcctcttcaccaacaacaaagagcatggcacgttctgtgatcgtttcgaggtcgcgcaatggatagaaatctaatagtttagtaaaagttgtacgagtgggatggagtgtcgagttggctgcgccacgttgggtacgataaaagtcgtagaattcacgttcgatatcagttgagttttcgtccagttcttcaggtactccatgggcgtaagtggttgcttgacctgcaatctctaatgtccgggatcgtgaggattcctcgattaatgcgttgccgcctagtgcatcacgctgttcgcgaacaatggcacccatatcggttaagttaatagttgcaagtgctttaatacgtgcgtctattttgagtgcgttgagcgcgaaaccaccggccgaaccaattgcgattaagccaatacggtcattggcgacacagtctagagtggttaggtagtcagtggctgctgagaaattctccgcatataagataggggcaatcgcgttgcgcagagcaccgttactcccgccccaagcagattgatcaaatgaaacggttacaaacccttgttcagcgagcttaatggcatataggttagctgcctgttctttaacggcaccgatgggagcaccgatgattagtgctggaaaaacagtttccgtcgagtctttgggaagaaagacgttagcagttacttgcatttcatagatattcttaaaagtgacgggatgctgttcaacggctgaactttgaaaccagttattggcgtcgtggtggacatcgccagttggtaaatccggattacgacggcgtgcattaattttaccggctgaatacgacggttgtctagatggcatgctactcctcctataaaaataatttcttatccttattataaaatataagaatgtgaaatactactttatattattaatttgtaaacgattaatttgatgtctgctagtgatgattgtaatagtcgataatggtcagatggttggcattttatagtgaaaataaaaaattaattatagcacagtgataaaccaattccggcttattcttttcgaagtaagttgtgactgccgctgaatcagtaatatctaactcagtagcatctgtccccacgtattcaatttgattttcatctaataagtgccgtaattcggtccctaattgaccatttgcaccagtgattaaaattttcatagaataaatctcctctattttaattcatccttaacaacttgtaatgccgcatgaatcacttgatgcatatcgtagtaacgatattgccctagacggccaccgaagaccactttgggttctgtcaccgataaatcgcggtatgctttgtataagcggttatttttgtcgttattgattgggtaataaggttcgtcaccacgtgaccagttcgcaggatattccttcgtcacgattgttttattcttatcgcctttaccaaattcaaagtgtttatgttcgatcacccgtgtataaggcgtttcggcatctgtatagttaacgaccgcgtttccttggtagttatcaacgtccatttcttcggtttcaaagcgtaaactccgatattcgagttcccctaattgataatcaaagaattgatcaatcataccggtaaagatgactttatcgtattgatcgatgtagtcttgtttcttatcgaagaaatcaacacccgtttcaacatcgattaaatcactagccaacattttttcaatgatttgtgtatacccaccaattggaatcccttggtatgtatcgttgaaataattattatcatacgttaaccgtactggtaaacgacgaataataaatgatggtaattcggtagccttttggccccattgcttttcagtataccctttgattagtttttggtaaatatccgtcccaattaatgaaatagcttgttcttccaagttttctggttctttatcgcccaacaccttgcgctgttccgcaattttagcggccgcttcggcaggtgttgccacaccccataacttattgaacgtattcatgttaaatggcaagttgtagatttcacctttgtagttagcgactggactattggtgtaacggttaaactctgcaaattgattaatgtattcccagatttctttgttgctagtatggaaaatgtgggccccatattggtgaacttgaatgccatcaatttcctttgtatagatattaccagcgatgtggtcgcgtttttcaattactttaacgtggttcccacgtttggccgcctcgtatgcgaaagttgcgccaaagagtccggaaccgactactaaataattagtcatattattttctcctaaatctaaattattatctcaatcattaattaacgagtaactttctttactaatctgacaatatctctgttaattctagttctcaataatacaagtagcaatacatatacaattgtcacaataattgaattaactaccattgttaagaacaaactaggtaacacaattttaaaattcaggacagcaagaacggtcattagaaaagcaagtacatacctaagctgttcatgaactagataccgtaaatctgcttctttacgaaccatgtaaattctcatagaacatacgataaactcggttaaaataataaccgccgttccgccatccgctccccagatattaacacaaatcacatttaaaataacactaattaccgcacccacaattgccggaattgcatattgtttataatcaccattgaccaatgagaattgactgccaaatacttcaccataggaaataaaaatcattattaaaccgacccataacatattattcgtcattggtgtatatgatttcccataaaaccacggtacaaattcggatgcatttaccattagtaacatagtaaacagttgtgcaactaataatgtatagtcaagtgatgtttttaataactgatccactttttcattattagcatgattcattcgaagttggaccattcttggcattaaaatggtactaactgaagtaataagtgttactaacattcgcgcaatccgttgtgattgatcgtaataagttaattggacaggccctgcaatccaacctactagcgtactatcaaaattggtataaaattgaactgcaagctgtgggataactaaaatcatggcttcttttaaaaagattgacttagaaaagaaccctttaaaacttacttttgtgatgatcccctttaaattaagccagaaaataatatttgcaaaaaagatgcttaaactattaattaatacgtaataacctaaatcactaggtttctttacaaatataaaaatcattgcaacagaacatattttaattaaggtatttcgaacaacaacttttctaacttctcctaatcctatgaagacccaggaaatgtcaattgcgaatccaattaaatatggaatattcaatagcaagtatgttttatattcactgaacattgcaaagaacgtatacgccagaatcactaaacaacctactaaaaactgtattttccataactgtacaaagttactacctagttcacctttatctttgtgggattgggcaataattcttgaacctaattgattcatccccatcaaaatcacaaaactcagaaacatggaaatagacgtaatgaatgaataactccctagtgctcttgcacccaagacacgtgctacatacggtactgtgataattggcaatgccagtatcaacaactggtaaataccgttgtagattatattgttaagcgtctttttcataattgctccatatctttcaatatcctagataatacatccacacgatttattcattatacgctctcttaaaagttgtctcaggaatcagcttacatccaaaagtactaggccctttttttcacacgatatctaagctttttttacccccgtgaaataccattgaaaaaccctaagccataaaatcagaaagccagcttggactcgctgggaaaaatactgcttagtatcaacttggttagttggcgctttctcaaagccatactcgtttattgaaggactagttaaaaatcagtcctaagcccatgaaaacgataaatgaaagacaaatcaacgttgcgtttttaattgaaatcgtgaaagtttctcgtttgacctgtttgtgcaagaagacccgcgtatttttccaaactggaataatactgagcaacgttagtaaactaaactttggcagcacacccatcaagaccgcgatcaccagacaagcatagccagcaacgtaactccatgcaaatacctgaagcatcaccggtttgccaagataatacaaaatcgtgtgtcggcctaacgcaatgtcttcgtccatatcacaaatgttattagctaacataatgttagaaattgcaaaaatggccagacctgacgcaattaaaacagccagcgttgactgccaagtaatggctgccgtgtcatacgtattaataaagacggcaatccagaagatcataaagcccatcgtaaagcccgagaaaaattcgccaaacgggccttgtgaaattggcttcggtccgccagcgtaaaagtaaccgaccgcatatgaatatagccccatccacaacaacggcaaccccgtttgtgttactaaccatagtccgataatcaatgagattccggctaaaccaaacgtaatcgtccgggcctgaccaatggaaatctggttaacaccgaccacattagtctcttgcaaaaattcttgattgtcgtcattacgtggcgcgtgtaggaagtcttggtaattatcattcgcattagtcgccatatgaaaaagtgaagatgcaatgaaaaatagcaataaataaccaagatgtaactgatgataattataataggcgtacatactccccaaaacgaacggtaacacgctcgcaattaatgatttaatttcaacaaattcaagaaacacttttggtttcaatgatttacaccatccttttgtttgataacgaaacaagttatttgtacctttaatatagattgtattttagaatgtgactggctgcaagtgttggcgtcaaaacgtcccggagccatctctcaaataaagcggggtattttgattatgatgcaaaccatttggcaaccggaaagtcttgtcgcaaaggagctagcagcgctgaagccgtatctagctactaacgtaaaaattgataacgccgccattaatgaccgcgtacacgacttactcgctgcgggtggtaagtttttacgcccgggcttcttttacttgtttagtcaatttggaccggatcataacacggcccggttacgtgctggcgcagcggctatggaactactacacgtggcaacactgattcacgatgatgtaattgatgaatcgccagaacgccgccatgtgacaacgatccaccaagactacggtcaacgtaatgctatttacgccggtgatctgctgtttacctgctatttcgatcaagtcctgattgctgccaagacaactgacgacgttaaaatcaatactgcggcgatgcgagccatcctccaaggcgaactggatcaaatggcacataacttcgatccgacgaccacggtcgatgactacttagcaattgctcgtggcaaaacggcccgtctgttcagcctcagttgtgaacaaggtgcccacttcgcgggtgccgacgcaagcgtcgttaaactagcgcaacagattggtgaaaggatggggttagcctaccagatgttagatgacgtccttgactacgccggtgatgaggccttaactcaaaagccggtgcttaatgacttacgggacggcgtttattcactgccacttatctacgccctgaccgctgaaccacaattggccgaacaattaccccaacccggcgaccacatcagtaatgaacagctactgacaattcgcgatcaggtcattgctttggggggcgttacccaggcacaacaattggccactcactataccaaaaccgcactgaacctaatcgatcagctaccaactggtgaaacacaacaaactttacgccggctagtgactgaattactggttcgcaaccattaatggtagattgcaaatttaatccgaatttttggacaaatttgtcagcataacctgatacggtgtttgccagtcgagtattttaagcggtggctggttaatttggagtaacgtcgtcgttaaatcttgagcactaatgtgctcaaaacgagtccctttaagctcaaaaagaatcaggcgcaaccgtttttggttatcatgtgaatgatccagaacgctttggcgttgttgattttgatgaaaatatgcatgctaaatcaatcgttgaaaagccagaacatccggcaagtaactatgcggtgactgggttatacttctacgacaaccaagttgtcgacattgcgaagaatattaaaccttcaccacgtggcgaactagaaattacagacatcaacaaagcgtatcttgaaaaaggccagctagatgttgaattaatgggccgtgggtttgcttggttagatactggaacccatgattcattacaagaagccagcagttttattgcgaccgttcaaaaacggcaaaacttgaaagtggcgtgtctagaagaaattgcttaccgcatgcactatatcgataaagcaaaagtgattgaattggcacaaccactcaagaaaaacgactacggtcaatatttattgcgattagtaaaagaagattaggggtaagtaatcatgggtaagttaaaagtcacaacaactaaattacaagacgttaaaattattgaaccagccgtctttggtgatcatcgtggattctttacagaatcttattcagatcgcgatttcaaagaagcgggcattgatattgatttcattcaagataatcactcactttcaacgcaagcaggcgttttacgaggcttacatttccaacgcggtaaagctgcgcaaacgaaattaattcgcgtggtgactggggctgtcttagatgtcatcgttgacgttcgtgcaggttcaccaacttacaaacaatgggaagggtacatcctttctgccagcaatcaccgtcaattacttgttccaaagggcttcgcccatggctttgtcactttgacggataacgttaacttcttgtataaatgtgatggctactatgatgcagaagctgacggcggtatttcattcaagacaccagaattaaacatcgattggccaattgattttgaccaagcaattacgtctaaaaaagatgctaaccaaccaacctttactgaatttgaaaaagataatccgtttgtttacggtgaaatttaaggagatcgacacactatgaaaaatattattgttaccggtggggccggctttatcggttctaacttcgtgcattatgtggtgaataaccacccagaagttcacgtgacggttttagataaattaacttacgctgggaaccgtgcgaacttggccggtttaccagcagaccgtgtggaattagttgttggcgatatctgtgacgctgaattagtggatcgcttagtccaaaagacagacgcagtggtacactatgctgccgaaagtcacaacgataattctttgaaagatccttcaccctttattcaaacgaacatcatcggttcatatacgttgatcgaagcttgtcgcaagtataatgtgcgttatcaccacgtttcaaccgatgaagtatacggtgatttaccattgcgtgaagacttaccagggcacggcgaaggcgttggtgaaaaattcactcctgaaacgcgttataacccaagtagtccttattcatcatcaaaggcgagctcagacttgttagtccgggcatgggtgcgttcattcggcctacaagcaaccatttcaaactgttcaaataactacggtccttatcaacacattgaaaaattcattccccgtcaaattaccaatattttaagtgggattcgaccaaaactttacggttcaggtcaaaatgtgcgtgattggattcatacgaatgatcactcaagcgccgtatgggcaatcctaaccaaaggcaaaatcggtgaaacttatttaatcggtgccgacggcgaacaaaacaataaagatgttttggaattaatcttagaattaatggggcaacccaaagatgcttatgatcaagttaaagaccgtccgggtcatgacttacgctatgccatcgattcaacgaagttacgggaagaattaggctggcaaccagaattcactgattttaaatcaggcttacaacataccatcgactggtatcgtgacaatgaagactggtggcaagcagaaaaagcagccgtggaagccaactacgctaaaaacggtcaataatgcgataatccctttatggttgtcagatgaaatacaataattcatctgacgactatggagggatttttgtatgcccagatctaaacatacggtactcgagaaattaacaatcttagatgaactgacccaatcaaaaattggactgggtccggtggccaatcgccatggcattaatcataagacgctagagcgttggcgagatcgatactcccgtgatggaattaatggtctaaaggaggctaagaaaaacaaacactattcgaaggaactcaagctcaaagtagtccacgcatatcttataggcgaaggcacctttgatgaacttgcaaataagtttggacttcgtggatcgcagcaagtcgtagactgggtaaacaagtataatgggaataaacctttgacggcgtcgccgtccagaaagcaggttcccactatgagccgtaaaacaaccttggaagaacgcattgaaattgtcgagtatgtcaccaagctgaatcattcatacacagaggccgctgaacgcttccaagtctcttatcaacaagcacgttcatgggtaatcaaggccaatcacggcggctatgaggcgctcgtggacaaccgtggccatcacaaagaacaagctgagctgactgaactcgataaagccaatcttgaaatcaggcagctcaaagcacagctcgcagacaaagagcttgtggaggcattcgcaaaaaaattgctggaaatccagcgcagggggtgagtaaacaacatcgactgtcttacttcgcaattaatgaggtcagtcaaggcaagcgtggtgcaatatctacgctgttggccgttgtcggtgtaagccggcaggcttactacaaagggttaaatcgagaagaaacagcttgggaagcccgtaatcgtcagctcaaggaacggacacaatactggtttgattttcatcatcaaggtatcggtgctgggaaccttttattgaatcttcaacatgatgacctaattgacttccccgttactttcaggatggtacgtcgtgtgatgcgggagctcagcttgacatgtcaaattcgggtcaagaagcacagtcgacataaggagaacgaacagcacattcaagacaatgtgctcaatcagaacttcgacgtcgacagtcctaatcaggtctggttgtccgattcaacggaactgacttacggcgtaaataataagtataaggtgcgcttgagtggcgtccttgatctctacggccgacgtttgttgtcctacaatttgagcactactgaaacgtcagcagcagaaatcgaggttttccaacgagcctttgaggcttctggcgacgtccacccattggttcacactgatcgaggatcagcctacacctctggtgccttcaacaactttcttggtcgttacaacgtcacacgtagcatgtctcgaccaggaacaccatacgacaacgcaccgatggagcgctggtggaacgaattcaagttacggtggatggctcgccatccactagcaaagacttgcgaagagcttgtaagactggttgaggaaggaatcgaatatttcaatcaccacaaccgctcagcacaaagaaacggcctcaccccagatgaatactggagtgaagccgcatagagacagattcaactttatattatttcatttgtcaacttgacagggcctagtgcatcctgaataattcatactttgttgcgtaaaggtaatttgccccttttaacgtttaatttagctcaaatttaatccgcaactatttttgagtgtatttgagctatttttaagacaattttatttttgattggtgtcaaaagagtaaactactcccttgatcgtacttaaattttttaaattgtcttttttaattactagtgagctgaaattcttgaatcctaaacaatgtttgccagtataaatcatcaaaaacattggtactagaaagatgcagccataatttacgtgcatgttgggtgactctgccggccaaatgaaagagcttgaaacgtaaagtggcgctcgttgcgttccctaattcagctgggaaaaccagttttttcatggcttgaactaagttataagccacaccggcgagtaacattctaaactggttagccgtaaaactggaactatccgttttatcaaaggcaaagccacttttaacttctttgatcagatcctccatggctccacgttggtgatagagttcaaagacgtcactggcaaaagccagctccaagttagtcacgataaattcgtgtttaaagagtagctcgccagcagggcgagttgatttaatgatcacggggtaagcgcgaccccaagtgtccggttggtaatctgtcaaacggtgccactggacatctttttcggcgaagtcttccccaggttgccccacatggatcaagtgctcggcgatccgttgtagttttggattagccttgagacggatcgtaaactttgccccagcttcttcacaggcggcataaatttctggcttggcaaaacccgagtcagcccggactagtacatctaaagcagcgtattgtttcagtagcggtttcaaaaaagcttccgcatttttggaagtgtattcgttacctggccgtaatttagctcctaagagacaacccgaaaaaccatcaaaagccaacaggggatgataaccgttcgtttgataatgggtgttaaaagcactgcctttctggtaaccaaatgtatcggaatgagtcgaatcaagatcaatgatcagttgacgttgcttcttttgtgtgatcactaactgcgctaacttggcgactaattttgtgatcccggccaagtcgtctgcggaaatttggttgatatagcgtgaaagagttggttgcgaagcaactaaattatctaaaacaagctcaaagctcatgtctgcggtcagtttattagcggcagtatcgtcgaaataacccgcaatcagctgaatcaacagttgtttaaacagctggttcttatggtacctatagaacttgcggttttccttaaaatggagagtttctttcaaaaggcgcttaaagtggatctgatgcataaattcagccactaaaattagacccgcatcgttagataaatgaccaccattattagaaagaaccagatttttgttgaagttaacggtttgttgttgtaaagtcgacatatggagcactcctgttctgtgttggttttggtcgacttaacaatagcacaggctgtgctctttttgtatacgcaattaaacacctaaaaggtgttggtttggatcacggacaaacaagatgataacaggcaaagaaagaaaaactgttaaagatatgaattattcagggagagtagacctctcaaaactaaacaaagtttcgacttcgcaaatgtacaaggttttccgtattattccttagaaaggaggtgatccagccgcaggttctcctacggctaccttgttacgacttcaccctaatcatctgtcccaccttagacggctggctcccgaaggttacctcaccggctttgggtgttacaaactctcatggtgtgacgggcggtgtgtacaaggcccgggaacgtattcaccgcggcatgctgatccgcgattactagcgattccggcttcatgtaggcgagttgcagcctacaatccgaactgagaatggttttaagagattagctaaacctcgcggtctcgcgactcgttgtaccatccattgtagcacgtgtgtagcccaggtcataaggggcatgatgatttgacgtcgtccccaccttcctccggtttgtcaccggcagtctcactagagtgcccaactaaatgctggcaactagtaataagggttgcgctcgttgcgggacttaacccaacatctcacgacacgagctgacgacaaccatgcaccacctgtcactttgtccccgaagggaaagctctatctctagagtggtcaaaggatgtcaagacctggtaaggttcttcgcgttgcttcgaattaaaccacatgctccaccgcttgtgcgggcccccgtcaattcctttgagtttcaaccttgcggtcgtactccccaggcggagtgcttaatgcgttagctgcggcactgaagggcggaaaccctccaacacctagcactcatcgtttacggcatggactaccagggtatctaatcctgtttgctacccatgctttcgagcctcagcgtcagttacagaccagacagccgccttcgccactggtgttcttccatatatctacgcatttcaccgctacacatggagttccactgtcctcttctgcactcaagtttcccagtttccgatgcacttcttcggttgagccgaaggctttcacatcagacttaagaaaccgcctgcgctcgctttacgcccaataaatccggacaacgcttgccacctacgtattaccgcggctgctggcacgtagttagccgtggctttctggttggataccgtcactacctgatcagttactatcaaatacgttcttctccaacaacagagttttacgatccgaaaaccttcttcactcacgcggcgttgctccatcagactttcgtccattgtggaagattccctactgctgcctcccgtaggagtctgggccgtgtctcagtcccagtgtggccgattaccctctcaggtcggctatgcatcacggtcttggtgagcctttacctcaccaactaactaatgcaccgcgggtccatcctaaagtgatagccgaaaccatctttcaaccttgcaccatgcggtgctaggttttatgcggtattagcatctgtttccaaatgttatcccccactttagggcaggttacccacgtgttactcacccgtccgccactcactcaaatgttatcaatcagaagcaagcttcttcaatctaacgatattaccaagtccagttgctgcgcgtgctggcggatcttcgggtggctctggtggttcgggtggtagcggtggtgggtcttcaccgacatccagttatgttggcggccgtagtcgtgattattattacgatgatgcgggatgtcggcattactacaagtccccaatgcgtcgtttattcgatagtatagtcaccctgcctttcgtattcgtctcccttgggatcatgatttggcgtaaagtgcgtgactggttaaccggacgtagaaaacgggcactggctgataccatgccgttagatgctgaaaccgcggcgcgctttgaaaatgcattctatcaaattgaaacagcttggccctcaaatgacttaagcaacgtggcggacttaatgacgccccattttcagcaccaacaacaacgcatcttaaaccgttatcaacggcaccataaacataaccaacttgagagtatcgccattgtttcaactgagttattattacctgaaaaaccgaaccgccaagatattctagtgacagcgcaaatgcgcgattacttcactgatgagcggcagacagccacggttaatgaccaacgtcgtgaagcggcttatattgaacgtttcagcgaaatttgaacgtttaaattaattgatggtcaatatcgtgtcgctcatattaatcaatccctataaaagagctaccagttggtggttcttttttgttatttaattggttaagtttattgcgttaaacaactttttctcttaaaatagaccttatcgatttaaaaattgtttatccattttgattagaaagtgaggtcatttgatgaccctccatgttggcactggccagacacaaacggccgtttccttaatgccgcgtaacctagacgattgtgtgcgtgaaatggcactcgttgagcaaaagcaagctgcgattgatattctagaatggcgcttagactattggcaaacaccagcgaccttattaacggctggtcaccaaattgccgcctgcaagcaccccgttattttaacgctcagaacaacccatgatggcggcctgtctgatccaaccgactatttagaccgctatacagctctattatcggctcaaatcggcgatgtggttgatattgagtggtctttacctgaggcagttagaaaagccgtcagcacgcttgcacgtgcgaatggctatcaagtgttactaagccatcatgatttaaagacaacccctgataatctaacacttcaaaaacaactcgcagcaatgcatgcgacgcacccagatatgttaaaactagcaactaccgctcaaagtaatgaggatactactcggttaatggcgattacccagtcttttacacatgatcacacaaccccactgatcacgatggcgatgtctgaatttggcttagcctctcgcatttttggtggtcaattcggttcagctgtgagtttcggttaccttgaacaccccagtgcaccaggccaattacccattgaacaactcaaaggcttgttgacaatgcatcaaaattaaccgcacaaaaaaagccccgcactagttagaagcaagatgaatcaccacacgacgggcgtgccaagtaatcctaccggcgatgtgaaagagactgaaccgtagcgaggagatggttgaacgacggtcttccgagacaaagagctgtttaaagagctgaaccaggttataggcaataccggtgatcaaggctcgtgcagtgttccgtgcaaaagttgagctgtctgttttgtcaaagccaaacccgcatttcagctccttaatttggttctcagcattgccccgctgtctataggtcttgaacaaagtctctggagcctcggaggccaggctggtcactacgaatgcgtggttccagggaactagctcatctgccgtatgagtagaacatacgataacacggcgagctttaccccatgacgcggcctgatacttgaattcgtggtagacgcatttgctctcttcatattttggagggcaatccactaaggccgtttctgccagcttcccaagctttgaatttgccttgagtcgaaccaaaaagtcgacgccatgtgtgtcgcacatctcgtaaaattttggcgcagcaaaccccgaatcgcctcgaatgatgacgctggtgctttgagggagcgccgataggcgcgaaaaagttgtctcgacgaacttatcggcttccttgccggtgtactcattgccagggcgcatcaaggcgtctaagagcaacccggactcttgatcaaatacaacctgagggtgatatccataggccatatagtgagcgttgaaggcggaccgttcttgattaccgaaagtatcacaatgcgttgagtctatatccagcacgaagcgggattgaccactaagacggaaagccaaggcggctacttgccagataagcttccgaaagtcatctaggtcggcgtcttcaaggcgcttgaaaaaccgtgaaagtgagggctgtgagactagccgagagctacccaaggtggccgccagtacgggatcacgttgccagtcattggcactactgtcatgtaaatacccggcaacgtcgagcaacaatttttccaagaagatgtcgatcatcgaggccttccagaatcgtcgttggtctggtaacttgaggcactgattggcaagttgcctaaagttgatacgatgaagaaactcttggaacaaaacgagcccggcgtcatttgaaagttgaccgccgtcggcggtcagagtcacattggtattgcattgcagggataagctggttaaagttgagatggtgtgaagcctcgctttcgtgatggttttcgttgactcaaccttagcatataggcgcacccaatgggtgaaacaccaaagcagcgcagtcccgtgtgaatcgtgggattgcgctgcttttttgaaattctatgaataatccagggccgagcttcggcctcaaagttttgctggggtgtgcagtagccctgttgtttgcgaggcaactgattcaagcggtcttgcgtggcctgcacttgactagggctaatgtcatctagggacatgcccttagggaagtcctggcggatcatccggttatgtgcctcgttggtgccacggtcgcaggacgtgtaaggatgggcgtagaagatctcagtttccgtcccagcaaaagcagtatttaaggcggtgaactcgggtccgttgtcggctgtgatggtcttgatgcaagctccccattcgcgcttgattccacgcaatgcatagctcacagagtctgcatctcgtccttcgatcaagcggagaagttggcaacgggtcttgcgctcaatcagagtcaagatgacgctctccttgccattgcgtttaccgacaatggtatccatctcccagtgaccgaactgcctgcgtcgttcaacgaccttaggccgttcctcgatactgcggccagccaggtgcttagccttggtgtggtgctggtgagaggtcttccgcttagtcttctccaacaggtcgatatttcgaatctctaggcgttggtcgtcaatgtactggtacaaagtcgaggcacaaacaagctcttcaggagtaaacagcttgtgtcgcttggcatagccgattgaagcatccggcgaccatttgtcctgcttagctcgctgtacgtaccaggctaagaagacctgtacgctggcgaacttgtcaggacgatggcagctcaagcgtgcagtctcgtaacgtgcctgagcagcctctggcaggtattgtcgatggtagacgcgcttgccattactcttcttgacctgatctactgtacctcgcttgatttcattattaatggtctgcgggcagacgccaatttcagcagcaatccaacgattggacttcccagcttggcggaatccggccacttttccgcgctcgagtgatgttaagtgctgacctttttggcggtgtgtgctatcctgtttctgcatcaagacaatatcctcttccattgtttgtgtaggaacttcaatgatacaggatatctgttcttgatgttttttattgtccaaaaaattttgagacagtggctaacttgattctaaaatgcgcgctatgaaaaaggcattaccactagagaaattgccgatttaattgaaaagatgtatggttcacactatagtcctacgaccatttctaacattacaaaaatggttgatgaacaagtgactgcttttcattcccgtcctatttttcattcacaatatgtttgtctttttctagatgctacatatattcccttaagacgtgacgctgtccagaaagaagcggtacatattgctttagggattacttcttctggagaaaaagaaattttagattatcttattgccccacaagaatcagatgctgcttggtccgatttattaggcagtcttgtttctagaggactaactgatgtgcaacttatcgttgccgatggcatgaccgctattcaaaatgcttgcgaaagaaattatccccaagctaaatttcaacgatgtcttgtgcacattaaccgaaacattatgggaaaggttcgcgtttctgatcgtaaagaagtagccagtgatttcaaaggaattcatcatgcgatcaattttaaagagggtgaagaaaaaatccaaacctttatagaaaaatgggagaaacgttatccaagaatgacgcactctcttcaaaacacagaaaatctcctgatcttcacgcaatttcccaaagctattcgaggtactatttattccaccaacattattgaatctttcaataaacagttgaaaagaaaaacaaaaatcaaagaacaatttcctaatgaagaagctcttgatcgttttttagtcacccaaatggttgattataataataaaaaaactggtagagcccataaaggttttaaacaatgccaggacacattggattcaatgttttaaaaatataaatcaaactgaataaggtttaaatgaatttacacaaacttcttgacacaccctagataacataataagcggagaagaatcaactcatgaacaataacaaacaaagtagcttttttgatggtattggtttaggcattaatttaataatagcaggaatatttcttccgctactatttcataaggctcctatgatggaattacggacaaactgttcgatataatacatcataaaggagctttttattatggcaattaaatattcaaatgaatttaaagaatcgattgttagcttaagtcagactggccgttcggccaactcactggctaaagaatacaacgtcagtgtttcaacggtcactaagtggattaaacaagctgatcctaacaacactaaagtgctatcatcaaatgaacgtgctctgattaaagaaaataaacggttaaaagaagaacttgatattttaaaacgagcggcggtgctcatggcaaaaagctaattattaaagggcgtgccctcgtgttagaagtcgtcaacgctaatttacttgctgggcaccgcattacgcgtatcttatcagtactcaaaattccgcgctcaacctactatgattatctacattggcagccaagtagaactgaacgccgccggcatttaattaaacaagaagtgttaacggcttggttaagatatccaatgtatggctacccacgattaacgatcttactaaatcaacagtctgatattcacgttagtcagcgtctggtctatcaacaaatgtgtgaattagggattagatctagaatggttaaacgaatcaataagccaaccactcagactgattatgatcagcgaccaaacttgattaagcagttaactgatcaatctggtattttattgactgatattacgtacattccccttaaccatacttggtgttacctagctagtgtctataatccagtaacccgacgggttattgcttaccaacttaatacgcagatgactaaagaactagcgactaacgttattacccaagtcatggcgcaagcagttaaaccacaaattattcatagtgatatgggaagccaatacacaagtgacttatttgaaaacactttatcgaagtatggtatcaagcattcttactcccgaaagggtcagcccggcgataattaaactaaaaaacactatccgattggatagtgtttttttaactaattgattgaacgcgactggcaatcatcaccactaaacaactcttgatcatttcaatcggaaaatacggcacaaaaccggtcattaagccggtcactacggataattttaatgaccagattagccagagtgtgccaaatccgagttgaataatgcttgctagcacattgccgccgagaagtacgcggttcgattgtccaaatagttgctgactatagtgaacaattgccacataagcgataaaaccaatcagatagccgcctgttggtccgaccagcactgcagccccactggcataatttgcaaagaccggtaagccaagcatgcctagcatgagatagctcccgatgaccagtcgacttaagcgccatggtaacgtggtgccaattacaccaactgcgagcgtttggagtgttactggaaccagcgaaatcggtagactgacttgagcgctaaccattaataacgccaagcacatcccgactaagctaacttttctggcaaccgatagtgtcatttaaatcagctcctccttaaaatcaatcttttggccgactgccacttgcgagccattgctcagaattaacgtgccatccgctaaaagctgtgtaatgacaagcccattttgcaaacgtcggccaataatcgccgaccagttgcaataatgagcaccaatcgcctcgtccgcttgggccaatccggccgctagtcgattaagatacgtggcacaaaattgattgatgttcacttggtgggcgtttacggcttggcttacatccattatgaaactgccgctgccgtcctttttgaatatgtgcatgctttctacaacatgctttctacaataggaagagaattcatagttcactgggctaccagacccccttacaagttggttggggaataaatggtgtcctaacaggtactctattaacgactattttaataagtagttggtgggaaaataggcaaatattccattacggatttaaaaagagtgtaaaatcatttttaatcaagcaatatttatttataattttaggagttttaattatagggatggtttacacaatcacttcatttgtactgattggtgagctaacaggaataattgtacgctccataattgcgattttaatattatgtattctgtttacaggtttgttttggagaaatgaagaatttaattatctaatgtatttaatatatagaattttaaaatctgttaagaagtaaatggacataatatttctaaattaattagttcaaacttaagggggagttttttatgaaaggtattattctagcaggcggttccgggacacgtttgtatcccatcacacgcgctttatcaaaacaattgattccaatctatgacaaaccaatgatttactatccaatgtcagtgctcatgttggccgggattcaagatattatggttatctcaaccccaactgacacaccacggtttaaagagttatttggcaacggcaatgatttggggttaaacatcgaatacgccgttcaagaacaacccaatggtttggcagaagctttcgtgattggggcggatttcatcggcgatgattcagtatgcttaatcttgggcgacaacatctattatggtgataatttgtcagaaatgcttcaaagaacattcatcctttgtacgtataaaggggttttgcgcactttcctttaacgcgttttgaacatcttcataaggtaaataaaattcaattgtagatttatttaattttacaatctaccatataacgtctccatcttttcaaaacgacttaattctacgggctataaataacttaatttgccagtgtataacgtttcagattaagctaccactatgttataataaccatatcgaaaggagatcaatctaatgaaatatacgaaaaccaaagcagtattaaatcaactcgttgccgatttgagccagatgtcaatgattatccatcagacgcattggtacatgcgtggacccaactttttgaagttgcaccccttgatggatgagttcatggaagaaattgacagccaactcgatgtcatttctgaacggctgattgcgcttgatggcagtccttactcgaccttaaaagaaatggccgaaaacactaagattcaagactggcctggtgaatgggacaaaacaaccccagaacgcctcgcacacttagttgatggctatcgttacttggaagacctttaccaacacggcattgaagtatccgatgttgaaaaagacttcagtacccaagatattttcattggtctcaaaaccgcaattgagaagaaaatctggatgattcaggcagagcttgggtcggcgccggaaattgatgaataaaataatattaaaaaatcggtaggcttatggtagattgaaagtacttggatcaccagcacgacgcggtgccattgtcacaggaattgccttgccagtcactttgcgagcggcttcgacaatttccatatttgaaaaaccagttgatgagcctaagttaaaggcgttactatcatggccttcttcgaggtaaccgagggccaaaatatgggcgtcggctaagtctaacacgtggacatagtcgcggacgttagtgccatctggtgtatcataatcatcaccaaagatggagagttgttcacgtttgccagcagccacttgtaacacgattggtaacaagtgggtttctgggtgatgatcttcaccgattgaaccatctggtttggcaccagcgacattgaagtaccgtaatgcaacgaatttaataccgtaagctctgtcagcccatttcatcatcgtttccatcattaatttactttcaccatacgggttagttgggacttgtgggtcggattccttaattggaattgatttcggttccccataagtggccgctgttgatgaaaagacgatgtgtttgacgtcgaattcattcatcacttcgagtaaggcagtcatgccgtatgtgttattgtcgaaatatttaagtggtgcttgcatcgattcgggcacgattgagaaagcggcgaaatgaatcacaccgctgactttttcttgttggaagacgctgcgcatgaaatctttgtcgcgaatatcgccttgtttttattgatggaggtttagctcagttgggagagcgtctgccttacaagcagagggtcacaggttcgagccctgtaacctccattgagtcgttagctcagttggtagagcatctgacttttaatcagagggtcgacagttcgagcctgtcacgactcatcggccaagttacacgccaaaatgcgggtgtggcggaattggcagacgcgctagatttaggttctagtgtctatatagacgtgggggttcaagtcccttcacccgcattcaattgaatattcaatgaaagttatcttattatgccgacttagctcagttggtagagcatctgatttgtaatcagagggtcgggcgttcgaatcgtctagtcggcattaagatgcggaagtagttcagtggtagaacatcaccttgccatggtgggggtcgcgggttcgaatcccgtcttccgctttcattatgattaagccggggtggcggaactggcagacgcacgggacttaaaatcccgcggtaggtgactaccgtaccggttcgattccggtcctcggcatcataatgaaaaatgcacccatagcgcaactggatagagtgtctgactacgaatcagaaggttgtaggttcgactcctactgggtgcatataacgggaaatagctcagcttggtagagcacctggtttgggaccagggggtcgcaggttcgaatcctgttttcccgattttggaggagtagcgaagtggctaaacgcggcggactgtaaatccgctccttcgggttcggtggttcgaatccactctcctccatattttttagggatatagtttaaaggtagaactacggtctccaaaaccgtcagtgtgggttcaattcctactatccctgtttatattatagcttgcatattatgtgtgaatgtagtataattattcatgttaatgatggcggtattggtgaagtggttaacacatcggtttgtggatccgacatacgtgggttcgattcccacataccgcctttattcttgggctatggccaagcggtaaggcaacaggttttgatcctgtcatgcgctggttcgaatccagctagcccaatttactttttaagggacaggatttgttcttttatggcggtatagccaagtggtaaggcagaggtctgcaaaacctttatcaccggttcaaatccggttaccgcctttgcgtttaggcgctaaccttaattggtcaaaatgccggtgtggcggaattggcagacgcgcgggattcaaaatcccgtttcctcacggaagtatcggttcgaccccgatcaccggtataattgaacattatacagttttaaaaagccttagagatagggctttttttgttgcgttaataccatggttcttttgaatactaatagttaattctaattccaaccaatatagggagtgattactttgggtacatctactttatcacgttttcaacgtggcgcactagcacaactggtcaatgaggggaataaatcttaccaagtaatggctgacgccttaggcgtcgccaaagctacgattagctatgagttggaccgagttaaaccttatgatccagaattagctcagcaagatgcagatcgcaaaaggcggaattgcggtcgtcgttcgatgctgacggcagcattagcgactttaattaccaatcacttacgattaacctggtcaccagaaaccattgcggccgcttataacttgagcactgcgtcaatttataattggcttaatcgtggctggctccccttcaaattgactgatctacccaatcggaatgtccgccagcaccgagtgagcgaaaatcgtgggaaatttacaagtgggacttccatcgaacaacggccaacaactgttaatcaacggttagcttttggtcattgggaagtagatacggtgctttctagtcgaagtgagtcacgatcatgtctggttacattcgtagaacgtaagacccgacttctatgggccatcaaagcccctaatagaacggctaaggctctaaacaccgcctttggcctcaattttcaagtcaagtgcaacgatgataacgaattcttgatagtggtctaggctgttacgccatgcatcggtagtaatcgcatgggcgaagatagttcagaatacgtctgggacgatggttcagtgcggattggactgcttgaattttaaccagggtaactgctctgagagacttccctttcgggaagaattccctaagcagtccattggcgttctcgtttgtgccacgctcccaaggcgagtacggatgtgcgaagtaaatctgggttccaacaatctctgataacttggcaaactcggaaccattgtcaaaagtgatactctcaaattccttggccccgtagtcgtcgatcgtgtcctgcaaggctttaaggtaggtgcccgcatgatagtcaggaatcttgacgatgatctcagtccggctgtaccgttctgtgagcgtcattaatgctggctcatcagctaagcgaatacctttgaccaagtcgccttcccaatgtcccacgcctgtgcggtcattcacggccgcaggacgcaactcgattgagtcgccgtatatcttcttattcttgcgcttgtgggcgttcttatagcctttgatgcggcgtcgaaatccatgattgaatgtcttggacggaatgctttttgaggatattcgtctgatgttaccggactcacttctacgtctttatccttcaagatttcgctcgcaaattcataccaagtacatgaattgtcatttgaaagttgatacaagccatacggcacgtcgttttgaacagcgtataacatgaattcagccaacgtccgggtccaagttggacgaccgacttgatcactaacgactgttaaatgatcatgcgtcttcgcaagatttaacatcgtgtaaacgaagttcttaccatattcaccaaagacccatgaagtccggatgatgtagtatttgctcattgtatttgcaacggcttcttcaccagccaattttgtgcgaccatattcattcttaggtgcagctggggtttcttctgtgtacatttgatcattcgtaccatcaaagacataatccgtactaatgtaaacaagcgttgcgccgattgcttcagcagcattggcaatgttttgcgttccaaccacgttcactttgtaattgattgacttgccaggttcttcttcagcagcatcgacagctgtataagccttgaaactcgtcggtgtcgctgattttatcgactattttacgactcatttgcgtcaagatggttggtcgcctgatgcagcagtaggacgggccaaacttgaaggcttatatcaacctgaggagatggtctcgaccaagacgctataccactatattgatgcccagttacttgaagtccgcaatcttgatctactcgaaaaaacgcgccaccgtgccaaacatcatcactcgatcaagcacaagcgtctggccggacggagtattgatgaacggcctaaaagtatcgaccagcgccaagagttcggccatttcgaattggacaccgtggtgggcaagcgcaacggtcaagagagtgtgatcttaacgctgatcgagcgtcaatcccgctgccaaattctacgtttgatcgatggtcgtgatgccgattcagtcaactatgagctggcccagatctgtcaagaatacggatcaatcatgaagtcagttactgccgataatggcgctgagttctcggaagttggcgctgtacttaccggtgtcgctgacctttattatgcccatccatcaatcgttctaacgctcaaatgacttaattcagctaatttttcttgtgttaatccttttgactttctaattagtgtaatacgcgtttcgtgactcatacatttttctctctttcactaatgattttataaataatcatagatatatgctaaaagagttaacacgtcagtagtccgacaattaggcgacaggttactgacaataattagttatcatgcagaattctgcccgtctgggataatcttgagacggtttaaccacaataattaatttttgaagtttctgatgaattcaacaatatagtcactaaaacttattattgaaaatccaagcaagagacctaacatagataactcatttgataaaaagatcatactaggcacaataaataaagcgccaatcaaaataacaatattttgtaaattatacttgataagagagttaaatcgaggtgtgtatttttgttcatcgcgcataagttcatcgagtggaatattaaatagattggaaatcataatgatattttctttgtcagggtaacttttattcctttatcatgaatatgcgggtgtagtttagtggtaaaaccacagccttccaagctgttgtcgcgagtccgattctcgtcacccgcttttcatgggcctatagctcagctggttagagcgcacgcctgataagcgtgaggtcgatggttcgagtccatttaggcccattatctaaataatatggagaagtactcaagtggctgaagaggcgcccctgctaagggtgtaggtcgggaaactggcgcgagggttcaaatccctccttctccgttttgtatggcccgttggtcaagtggttaagacaccgccctttcacggcggtatcatgggttcaaatcccgtacgggtcattgtaacaatgttacattttatatgttttatggagaattacccaagtctggctgaagggaacggtcttgaaaaccgtcaggtgggttctgcccacgcgagagttcgaatctctcattctcctttatattatcgcgggatggagcagtctggtagctcgtcgggctcataacccgaaggtcgtaggttcaaaccctactcccgcaattttaacaaacgtactcgtaaatataattcatatagaggcaatgttggtaccgttgctaagaacttgatcaaccgtcgtttcttcactgatcgtccttatcaaaaactagtaacagacgttactgaagttcgctggggaaccaagacaattgatgaacgcgcctatttcacatgtatttatgatttattctcaggtgaaattctcagccatcaagttagtaaacaccctactgttgaatttactacaactgttttgaatcgagcagttaagaaaatccctaagaatttaaaataccggacaacagtccactcagatcaaggatttcaataccagcatcaagattggactcatatcttgaaagaacatcgcatttttcaaagtatgtctcgcaaagcaacatgtttagataatgcagcaatggagagctttttccatattatgaaagccgaagctttctaccaaaaagaaaccgatacttatgaaacgctagtttcacaaatatcggtttggattgatgattataatttttcaagaattaaaacaaaaatttactaagatattcatacgatgtaattcaccagttacacgacgataaccgtacgctggatgattcttcttgattatttggatggtttgtttaacagattggtcagatgaaccgttcggttcatgactaataatgtattcatacgtacttttggccataccaactatttttagaatttttactagtttgtgtttaagccttagctcttggatgacttgcgcttgttgttttcttcttcctggactaaggctcttaatttttttaggtattcattctcgatttgtagtaattcattttcttctctaagacgttctaactctgtttgttgccgtttttttgattgtttatcagctgacataattgtttgccgtcctttggaacgatataaggcatcagcaccctcagtctcccaaatatgttgccattgccagatggtcccgacgtttgagatattaaaatgaagtgcggttttcggataagaagccttattcgttttcatccattttaaaacattcatcttaaatgagccaaacttgtaagggggtctggtagcccagtgaactatgaattctcttcctattgtagaaagcatgcacatattcaaaaaggacggcagcggcagtttcataatcttcaaagaccggcactggataaacacattcctttttgaggaaagcgtgaaaggattccattggcgcattatcatacggataacccttacggctgtatgagtggcggatatgtagctcagttaaacgttgattgtaatcatcgctggtatactgtgatcctaaatccgtatggataatcaggtccccagtaatggttcgatttttaaccgcgctttcaagggtctttaagactaaatcagtagccatcttttttgagaacgaatagccgataatccgtcgtgagtgcaggtccatgatggttgataagtaacaccagccattacgcttcgtttgaatataggtcatatcagcggtccatttttgatttaaaccagtggtcgagaaatcctgcttaagcaag
